(19) United States
(12) Patent Application Publication
(10) Pub. No.: US 2023/0375558 A1
(43) Pub. Date: Nov. 23, 2023

(54) Methods for Using Collagen Hybridizing Peptides to Determine Collagen Content

(71) Applicant: 3Helix, Inc., Salt Lake City, UT (US)

(72) Inventors: Yang Li, Salt Lake City, UT (US); Lucas Bennink, Salt Lake City, UT (US); Michael Kirkness, Salt Lake City, UT (US); S. Michael Yu, Salt Lake City, UT (US)

(73) Assignee: 3Helix, Inc., Salt Lake City, UT (US)

(21) Appl. No.: 18/027,711

(22) PCT Filed: Sep. 21, 2021
(86) PCT No.: PCT/US2021/051594

§ 371 Date: Mar. 22, 2023

Related U.S. Application Data
(60) Provisional application No. 63/081,505, filed on Sep. 22, 2020.

(51) Int. Cl. G01N 33/68; C07K 14/78

(52) U.S. Cl. CPC G01N 33/68; C07K 14/78; G01N 2333/78; G01N 2800/56; G01N 2800/085

(57) ABSTRACT

The present disclosure provides methods for determining collagen content using collagen hybridizing peptides. The present disclosure provides methods for quantifying an amount of disrupted collagen (e.g., collagen with disrupted triple helicity) and/or total collagen. The present disclosure provides methods for quantifying an amount of disrupted collagen (e.g., collagen with disrupted triple helicity) as a portion of total collagen.

### STATEMENT REGARDING FEDERALLY SPONSORED RESEARCH

[0001] This invention was made with government support under 2R44OD021986-02 awarded by The Department of Health and Human Services, National Institutes of Health. The government has certain rights in the invention.

### SEQUENCE LISTING

[0002] The instant application contains a Sequence Listing which has been submitted electronically in ASCII format and is hereby incorporated by reference in its entirety. Said ASCII copy, created on Nov. 4, 2021, is named SequenceListing.txt and is 473,083 bytes in size.

### FIELD

[0003] The present disclosure relates to methods for quantifying damaged collagen and collagen content.

### BACKGROUND

[0004] The extracellular matrix (ECM) plays a fundamental role in the regulation of normal and pathological processes. The most abundantly expressed component found in the ECM is collagen. The triple helical structure of collagen is known to be highly conserved, however in certain pathological conditions the triple helical structure of collagen can be disrupted. In many instances, the severity of the condition can be correlated with the extent or amount of collagen disruption. Existing techniques for quantifying collagen disruption can take several days or weeks, or involve complex staining procedures. Furthermore, even if the techniques are performed correctly, a trained pathologist or technician may be needed to analyze the results, which can introduce inter- or intra-person variability in the analysis. Accordingly, there is a need for a fast, reliable, and/or automated technique that can determine the damaged collagen or the total collagen content in a sample.

### INCORPORATION BY REFERENCE

[0005] All publications, patents, and patent applications herein are incorporated by reference to the same extent as if each individual publication, patent, or patent application was specifically and individually indicated to be incorporated by reference. In the event of a conflict between a term herein and a term in an incorporated reference, the term herein controls.

### BRIEF DESCRIPTION OF THE DRAWINGS

[0006] FIG. 1 shows an exemplary process for determining denatured collagen content (left) and total collagen (right) allowing for the calculation of relative content of denatured (damaged/remodeling) collagen in a tissue sample treated with collagen hybridizing peptides (CHPs).

[0007] FIG. 2A-C shows immunohistochemistry images of fibrotic human liver tissue. (A) shows an image of healthy liver tissue without heat-induced epitope retrieval (HIER) followed by treatment with CHPs at 50 ms exposure time, which yields no observable collagen signal. (B) shows 1× magnification images of fibrotic liver tissue with HIER (left) and without HIER (right; Native) followed by treatment with CHPs. (C, top) shows 5× magnification images of the inset region of fibrotic liver tissue identified in panel B with (left) and without (right) HIER followed by treatment with CHPs. (C, bottom) shows 20× magnification images of the inset region of fibrotic liver tissue identified in the top row of panel C with (left) and without (right) HIER followed by treatment with CHPs. Samples processed with HIER show increased Cy5 signal corresponding to denatured collagen.

[0008] FIG. 3A-B shows immunohistochemistry images of human fibrotic liver tissue. (A) shows 1× magnification images of fibrotic liver tissue with HIER (top) followed by treatment with CHPs, fibrotic liver tissue stained with hematoxylin and eosin (HE), and fibrotic liver tissue stained with Masson's trichrome (Masson). (B, top) shows 5× magnification images of the inset region of fibrotic liver tissue identified in panel A with HIER followed by treatment with CHPs (left), with HE stain (middle), and with Masson's trichrome (right). (B, bottom) shows 20× magnification images of the inset region of fibrotic liver tissue identified in the top row of panel B with HIER followed by treatment with CHPs (left), with HE stain (middle), and with Masson's trichrome (right).

[0009] FIG. 4 shows normal rabbit skin sections of different thickness stained with 20 μM R-CHP after heat induced epitope retrieval. As the thickness of the tissue sections increase, more CHP intensity is observed. Signal quantification using ImageJ/FIJI shows a near-linear correlation between tissue thickness and signal intensity.

[0010] FIG. 5 Representative photomicrographs of mouse livers stained using five different methods including Masson's Trichrome (MT), Herovici's Stain, Picrosirius red (PSR), collagen I & collagen III antibody cocktail (Col I/III), and biotin labeled CHPS (B-CHPs). Serial sections were taken from a healthy (control) mouse liver (A-E) and a fibrotic mouse liver 8 weeks after injection with CCl₄ (F-J). Collagen, identified by arrows in all photos, is stained blue in MT, pink/red in PSR, pink/red for mature collagen and blue for young collagen in Herovici's, dark to light brown for Col I/III cocktail, and dark brown in CHP staining (total collagen). Other features of interest are labeled as: C-central vein, H-hepatocytes, P-portal triads. Magnification was 40×, scale bar=200 μM.

[0011] FIG. 6 shows collagen quantification by image analysis software. Collagen was detected in all samples, with low overall collagen detected in naive samples, and significantly higher quantities of collagen detected in diseased samples.

[0012] FIG. 7 shows representative micrographs of detected collagen in fibrotic liver samples (CCl4, 8 weeks) using automated image analysis. In all images, green dotted lines represent the outer edge of the tissue and black dotted lines indicate areas excluded from analysis. Images in the top row are the images prior to analysis, and those in the bottom row show collagen highlighted by the image analysis (Red for PSR, bright green for all others).

[0013] FIG. 8 shows representative photographs of paired human liver biopsies stained using biotin labeled CHPs (B-CHPs). Subjects were scored by a pathologist of non-alcoholic fatty liver disease (NAFLD). B-CHPs were able to detect a difference in denatured collagen content due to disease remodeling in fast progressors versus the compiled medium, or slow progressing patients across all stages of NAFLD. These differences were found to be statistically significant with semi-quantitative assessment using modified H score which utilizes a multiplication of the area positivity×intensity.

[0014] FIG. 9 shows representative photographs showing total collagen (top row) and remodeled collagen from disease progression (bottom row) in B-CHP treated human liver biopsies. The paired liver biopsies were obtained from subjects across the NAFLD spectrum and were scored based on a pathologist's evaluation. Using total collagen staining via CHPs, pathologists were able differentiate between stage 1, 2, 3 and stage 4, by calculating a ratio between the total collagen and the remodeled collagen stage 1 with stage 4 (p value=0.00001) and stage 2 with stage 4 (p value=0.237) and stage 3 with stage 4 (p value=0.0197).

[0015] While the above-identified drawings set forth presently disclosed embodiments, other embodiments are also contemplated, as noted in the discussion. This disclosure presents illustrative embodiments by way of representation and not limitation. Numerous other modifications and embodiments may be devised by those skilled in the art which fall within the scope and spirit of the principles of the presently disclosed embodiments.

### DETAILED DESCRIPTION

### Overview

[0016] Evaluation of total collagen content can be performed by existing methods, for example, by using a trypsin-hydroxyproline assay. However, this method is cumbersome, as it can take up to several days to complete and is prone to error (e.g., from pipetting multiple times, which can compromise the results). Furthermore, this method completely destroys the sample so it cannot be used to provide spatial information about the distribution of denatured collagen within the sample. In contrast, certain methods described herein use collagen hybridizing peptides (CHPs) to quickly and easily determine the total collagen content within a tissue sample while also limiting destruction of the tissue. CHPs are disclosed, for example, in U.S. Patent Application Publication No. 2013/0164220, which is incorporated by reference herein in its entirety for all purposes. As shown in Lin et al., “Microplate assay for denatured collagen using collagen hybridizing peptides,” J. Orthopaedic Research, 26 Nov. 2018, CHPs can detect damaged or denatured collagen concentration with equal ability to trypsin-hydroxyproline assay.

[0017] The current gold standard for determining the severity of fibrosis in diseases such as non-alcoholic fatty liver disease (NAFLD), non-alcoholic steatohepatitis (NASH), chronic kidney disease (CKD), and idiopathic pulmonary fibrosis (IPF) is to take a biopsy and evaluate the tissues using histopathological or immunohistochemistry (IHC) techniques. Several stains can be used to identify collagens within a tissue biopsy (e.g., Picrosirius red (PSR)/Fast green, Masson's trichrome, and Herovici's Stain). Damaged collagen can be identified by the absence of stain or by colorimetric evaluation by a trained pathologist. In addition to the aforementioned stains being indirect indicators of collagen damage, these stains also require complex staining procedures with numerous steps, some require the use of specialized imaging equipment (polarized light), and no objective image analysis method for evaluating the collagen content. Trichrome staining (Masson's or Mallory's) has been found to underestimate the collagen content. This method utilizes three different dyes to stain cell nuclei, collagenous proteins, and cytoplasm. Intact collagen is stained blue or green, keratin and muscle fibers are stained red, the cytoplasm is stained pink, and the cell nuclei are brown or black. Damaged collagen is harder to distinguish as it will be a mixture between the available colors as the structure is damaged, therefore it is difficult for an objective image analysis method to identify the correct regions. Sirius Red/Fast Green stain was developed to overcome the problems with the trichrome stains and could offer better visualization by polarized light. This stains collagen fibers and bundles red while the non-collagenous proteins (i.e., fibronectin, laminin) are stained green/yellow. This staining procedure utilizes polarized light to increase the specificity, sensitivity, and resolution. However, damaged collagens would appear as a dark region because damaged collagen lacks the orientation of intact collagen fibrils. Picrosirius red is an elongated birefringent molecule, and in tissues, picrosirius red binds to a variety of molecules, not just collagens. When bound to collagen, however, it orients parallel to the collagen fibrils, thereby greatly enhancing their natural birefringence. Thus, the complex fibrillar collagen/Sirius red is more birefringent than complexes made of Sirius red and other proteins. Sirius red-bound fibrillar collagens can then be detected under polarized light, where they appear bright and in sharp contrast with the rest of the tissue that remains dark/black. When the collagen is damaged it doesn't have birefringence. Lastly, Herovici's stain is capable of differentiating type I and type III collagen as well as young or old collagen. The young collagen is stained blue, mature collagen is stained red, cell nuclei are blue/black. However, it is subject to high variability in tissues where the collagen is denatured and the use of numerous colors of stains can produce variable results.

[0018] The evaluation of these stains can require a pathologist with a practiced eye to evaluate the coloration of the tissue, and each stain's coloring can be easily misinterpreted leading to inter- and intra-observer variations. This is partly due to the fact that damaged collagen is an unstructured protein and most stains or antibodies have difficulty targeting an unstructured 3D epitope, leading to regions that are partially stained or have incomplete staining. Therefore, when using these staining methods pathologists identify regions of damage collagen based on areas without stain (e.g., using Masson's Trichrome staining).

[0019] Another method for staining tissues is by utilizing antibodies for IHC. Even though antibodies are known to be highly specific, one of the main difficulties is overcoming specific or non-specific background which often times requires multiple blocking, washing, and antigen retrieval steps prior to application. Moreover, antibodies require a defined, intact, 3D epitope in order to bind successfully, so trying to bind to a damaged, unstructured protein such as denatured collagen, is often times impossible. One commercially available antibody is the C1,2C Antibody (Col 2 3/4C short Antibody) Rabbit Polyclonal Antibody (Ibex Pharmaceuticals; Montreal, CA) which can detect cleaved collagen type-I or -II segments. More specifically, it recognizes the α-chain fragments containing an approximate 8 amino acid sequence (GPPGPQG (SEQ ID NO: 350)) at the carboxy terminus of the three-quarter piece produced by collagenase (MMP-1, MMP-8 and MMP-13) cleavage of type II collagen. However, due to chance of further cleavage by either MMPs or other enzymes can cleave the peptide before the antibody can bind because of the fast cleavage kinetics of enzymes, and clearance of short fragments from the area, detecting this fragment is inconsistent and does not convey the full extent of the damage. Because the CHPs in the methods of the present disclosure recognize the α-chain secondary structural motif, they can hybridize to any section with a sequence of (Gly-X-Y)₃ or longer (e.g., (Gly-X-Y)₄ (SEQ ID NO: 351)). Additionally, the CHPs described herein can hybridize with any collagen type (i.e., Type I, II, III, IV, etc.) regardless of mechanism of damage (i.e., thermal, mechanical, chemical, or enzymatic) making it far superior for the detection of collagen damage within a tissue section.

[0020] Using CHPs directly addresses issues with existing techniques. In one aspect, the present disclosure provides CHP-based methods that directly stain damaged collagen (of any type) in a single step, as a single stain, with high specificity and provides an objective imaging analysis method to quantify the regions of damaged collagen or to determine total collagen content without the need to evaluate coloration of the tissue stains. Biotin-labeled CHPs may be used with a light microscope (e.g., the current instrumentation used by pathologists for imaging and scoring stained samples) or a fluorescent microscope to read fluorescence intensity. Furthermore, CHP-based methods may use a single staining reagent, as compared to the multiple steps and stains required for other staining methods (e.g., Masson's trichrome).

[0021] In another aspect, methods of the present disclosure stain both damaged and total collagen in a heat-mediated staining process, thereby avoiding incomplete or partial staining at the interface of intact and damaged collagens as seen with alternative staining methods (e.g., Picrosirius red). The methods of the present disclosure show how CHPs may be used to stain for the total collagen content in the tissue sections and evaluate their fluorescence intensity using software (e.g., ImageJ). In certain embodiments, physicians may monitor the progression of fibrotic conditions by comparing the total collagen content at various time points during disease progression. In certain embodiments, methods of the present disclosure describe how to fully quantify all the collagen types within a tissue section using CHP staining techniques. In certain embodiments, CHPs are used to quickly and accurately identify the damaged collagen content within a tissue section, and determine the percent damage in the tissue (e.g., by using the total collagen content as 100% damaged).

### Definitions

[0022] As used herein “collagen” can be from any tissue type (e.g., bone, dermis, tendon, ligaments, etc.). Collagen can refer to a molecule in which three alpha chains of polyproline II-like structure fold together into a triple helix. Additionally, this can apply to any protein that contains a triple-helical region including collagen types I-XXVIII and bacterial collagen. The term “collagen” as used herein can refer to all forms of collagen, including artificial collagen and collagen which has been processed or otherwise modified. In some embodiments, the collagen is selected from type I collagen, type II collagen, type III collagen, type IV collagen, type V collagen, type VI collagen, type VII collagen, type VIII collagen, type IX collagen, type X collagen, type XI collagen, type XII collagen, type XIII collagen, type XIV collagen, type XV collagen, type XVI collagen, type XVII collagen, type XVIII collagen, type XIX collagen, type XX collagen, type XXI collagen, type XXII collagen, type XXIII collagen, type XXIV collagen, type XXV collagen, type XXVI collagen, type XXVII collagen, type XXVIII collagen, and a combination thereof.

[0023] As used herein “collagen content” can refer to an amount of collagen in a collagen-containing sample (e.g., tissue). Collagen content can refer to the weight of collagen in a sample, the volume of collagen in the sample, the fraction of a specific type of collagen (e.g., disrupted or denatured collagen) in a sample relative to the total amount of collagen in the sample. In some embodiments, determining collagen content can comprise determining an amount of total collagen in a sample (e.g., by intentionally denaturing native collagen). In other embodiments, determining collagen content can comprise determining an amount of disrupted collagen in a sample (e.g., as a fraction of the total collagen in the sample). A “denatured” collagen refers to collagen that is no longer in a triple helical form.

[0024] As used herein, “sample” can refer to a portion of a biological organism. The sample can be a cell, tissue, organ, or body part. A sample can be taken or isolated from the biological organism (i.e., ex vivo), e.g., a tumor sample removed from a subject. Exemplary biological samples include, but are not limited to, a skin sample, a muscle sample, a skeletal sample (bone), a neuronal sample, a connective tissue sample, an organ tissue sample (e.g., brain, lungs, liver, bladder, kidneys, heart, stomach, intestines, etc.), a tumor sample, a cancerous sample, biological fluids (e.g., a serum sample or a urine sample), or the like. The term “sample” also includes a mixture of the above-mentioned samples. The term “sample” also includes untreated or pretreated (or pre-processed) biological samples. In some embodiments, a sample can comprise one or more cells from the subject. In some embodiments the sample is substantially or entirely intact (e.g., morphology similar to the tissue in vivo). In other embodiments, the sample may be processed (e.g., ground or homogenized into a solution). In yet another embodiment, the sample may be artificial or synthetic.

[0025] As used herein “collagen-containing sample” or “collagen-containing tissue” can refer to skin, muscle and the like which can be isolated from a mammalian body that contains collagen. The term “collagen-containing sample” also encompasses “synthetically” produced tissue (e.g., artificial tissue) in which collagen or, collagen containing material has been assembled or manufactured outside a body. “Collagen-containing sample” can also refer to a sample (e.g., a tissue sample or a biological fluid such as serum or urine) which has been homogenized into a homogeneous solution.

[0026] As used herein “disrupted collagen” can refer to a collagen molecule or a matrix thereof in which three alpha chains of collagen proteins, at least partially, do not form a triple helix in regions where the sequence suggest it should fold. “Disrupted collagen” can refer to a collagen molecule or a matrix thereof in which the three alpha chains of collagen proteins are, at least partially, unwound. The disrupted collagen can be disrupted full-length collagen or a fragment of collagen. A fragment of collagen can be any collagen sequence shorter than a full-length collagen sequence. Fragments also can be of a size such that they do not possess significant native structure or possess regions without significant native triple helical form.

[0027] As used herein “denatured collagen” can refer to collagen that is no longer in its native triple helical form resulting from thermal, mechanical, chemical, enzymatic, acidity, or other effects. The denatured collagen can be denatured full-length collagen or a fragment of collagen. A fragment of collagen can be any collagen sequence shorter than a full-length collagen sequence. Fragments also can be of a size such that they do not possess significant native structure or possess regions without significant native triple helical form.

[0028] As used herein “collagen hybridizing peptide” or CHP can refer to as a peptide having the sequence Sₘ-(Gly-X-Y)₃₋₂₀ (SEQ ID NO: 352), in which S is a spacer molecule and m is an integer from 0 to 10, Gly is glycine, and at least one of X and Y is proline, modified proline, and/or hydroxyproline. In one example, a CHP can be Sₘ-(Gly-X-Hyp)₉ (SEQ ID NO: 353), wherein S is a spacer molecule and m is an integer from 0 to 10 X is proline or modified proline, Gly is glycine, and Hyp is hydroxyproline.

[0029] As used herein “spacer molecule” can refer to one or more molecules or amino acids which are linked to the detectable moiety and/or the CHP. In one embodiment, the spacer is any one or more amino acids or their derivatives designated as Sm, where m is an integer of 0 to 10.

[0030] In one aspect, the CHP may be labeled with a detectable moiety. As used herein, “detectable moiety” can refer to a molecule bound to a CHP that is capable of generating a detectable signal when the CHP is bound to a target. The detectable signal may be an optical signal that can be imaged using an optical imaging system. The optical signal may be caused by a change in optical intensity of one or more wavelengths of light. The detectable moiety can be directly or indirectly bound to, hybridized to, conjugated to, or covalently linked to the CHP. In some embodiments, the detectable moiety is a fluorescent molecule or a chemiluminescent molecule. The CHP can be detected optically via the detectable moiety. Coupling may be covalent or non-covalent (e.g., via ionic interactions, Van der Waals forces, etc.). Where covalent coupling is implemented, the detectable moiety may be coupled to the CHP via a linker. In some cases, the linker is cleavable, such as photo-cleavable (e.g., cleavable under ultra-violet light), chemically-cleavable (e.g., via a reducing agent, such as dithiothreitol (DTT), tris(2-carboxyethyl)phosphine (TCEP)) or enzymatically cleavable (e.g., via an esterase, lipase, peptidase or protease). In some embodiments, a labeled CHP may comprise the following formula I (SEQ ID NO: 352):

L-Sₘ-(Gly-X-Y)₃₋₂₀ (Formula I)

in which L is one or more detectable moieties; S is a spacer molecule and m is an integer from 0 to 10; Gly is glycine; and at least one of X and Y is proline, modified proline, and/or hydroxyproline. In some embodiments, m is not 0. In some embodiments, m is 1. In some embodiments, m is 2. In some embodiments, m is 3.

[0031] As used herein, the term “antigen” refers to a compound, composition, or substance that may be specifically bound by the products of specific humoral or cellular immunity, such as an antibody molecule or T-cell receptor. Antigens can be any type of molecule including, for example, haptens, simple intermediary metabolites, sugars (e.g., oligosaccharides), lipids, and hormones as well as macromolecules such as complex carbohydrates (e.g., polysaccharides), phospholipids, nucleic acids and proteins.

[0032] As used herein the term “fixed sample” refers to a sample that has been treated to help preserve the morphological and/or biochemical features of the cells and structures as they existed before the sample was obtained from the organism. A fixed sample may be prepared by contacting the sample with an aldehyde fixative such as formaldehyde, paraformaldehyde, or glutaraldehyde. A fixed sample may be prepared by contacting the sample with an alcohol-based fixative such as one including methanol, ethanol or acetic acid. Alternatively, a fixed sample may be prepared by contacting the sample with an oxidizing agent such as osmium tetraoxide or potassium permanganate, or a fixed sample may be prepared using a metallic based fixative such as mercuric chloride or picric acid. In a particular embodiment, a fixed sample is prepared by contacting a sample comprising cells with a neutral buffered formalin (NBF) solution, which is typically used as a solution that is from about 2% to about 6%, or about 3.7% formalin (10% formaldehyde and 1% methanol).

[0033] As used herein, the term “slide” refers to any substrate (e.g., substrates made, in whole or in part, with glass, quartz, plastic, silicon, etc.) of any suitable dimensions on which a biological specimen is placed for analysis, and more particularly to a “microscope slide” such as a standard 3 inch (7.62 cm) by 1 inch (2.54 cm) microscope slide or a standard 75 mm by 25 mm microscope slide.

[0034] As used herein, the singular terms “a,” “an,” and “the” include plural referents unless the context clearly indicates otherwise. Similarly, the word “or” is intended to include “and” unless the context clearly indicates otherwise.

[0035] As used herein in the specification and in the claims, the phrase “at least one,” in reference to a list of one or more elements, should be understood to mean at least one element selected from any one or more of the elements in the list of elements, but not necessarily including at least one of each and every element specifically listed within the list of elements and not excluding any combinations of elements in the list of elements. This definition also allows that elements may optionally be present other than the elements specifically identified within the list of elements to which the phrase “at least one” refers, whether related or unrelated to those elements specifically identified. Thus, as a non-limiting example, “at least one of A and B” (or, equivalently, “at least one of A or B,” or, equivalently “at least one of A and/or B”) can refer, in one embodiment, to at least one, optionally including more than one, A, with no B present (and optionally including elements other than B); in another embodiment, to at least one, optionally including more than one, B, with no A present (and optionally including elements other than A); in yet another embodiment, to at least one, optionally including more than one, A, and at least one, optionally including more than one, B (and optionally including other elements); etc.

[0036] The terms “comprising,” “including,” “having,” and the like are used interchangeably and have the same meaning. Similarly, “comprises,” “includes,” “has,” and the like are used interchangeably and have the same meaning. Specifically, each of the terms is defined consistent with the common United States patent law definition of “comprising” and is therefore interpreted to be an open term meaning “at least the following,” and is also interpreted not to exclude additional features, limitations, aspects, etc. Thus, for example, “a device having components a, b, and c” means that the device includes at least components a, b and c. Similarly, the phrase: “a method involving steps a, b, and c” means that the method includes at least steps a, b, and c. Moreover, while the steps and processes may be outlined herein in a particular order, the skilled artisan will recognize that the ordering steps and processes may vary unless a particular order is clearly indicated by the context.

[0037] As used herein, the term “about” refers to a numeric value, including, for example, whole numbers, fractions, and percentages, whether or not explicitly indicated. The term “about” generally refers to a range of numerical values (e.g., +/−5, 6, 7, 8, 9 or 10% of the recited value) that one of ordinary skill in the art would consider equivalent to the recited value (e.g., having the same function or result). In some instances, the term “about” may include numerical values that are rounded to the nearest significant figure.

[0038] As used herein, the term “substantially” means the qualitative condition of exhibiting total or near-total extent or degree of a characteristic or property of interest. In some embodiments, “substantially” means within about 20%. In some embodiments, “substantially” means within about 15%. In some embodiments, “substantially” means within about 10%. In some embodiments, “substantially” means within about 5%.

### Collagen Hybridizing Peptides (CHPs) and Methods of using the Same

[0039] Collagen is the major structural protein found in almost all human tissues. Collagen turnover is required for natural tissue homeostasis, therefore denatured collagen is present at basal levels. However, excessive collagen remodeling (both degradation or synthesis) is often associated with many human diseases and injuries. In certain embodiments, CHPs comprise a short repeating tripeptide that is capable of specifically binding to denatured, degraded, remodeling, or unwound collagen with no affinity for intact collagen molecules. CHPs can distinguish damaged collagen by recognizing a structural motif (e.g., the poly-proline II-like helix of alpha chains) which are not available on intact collagen molecules, then CHPs re-form the collagen triple helix through hybridization by forming a highly stable and long-lasting bond. In certain embodiments, the preset disclosure provides a method by which CHPs are used to directly determine the total collagen content as well as the percent of damaged collagen within tissues based on their total collagen content.

[0040] FIG. 1 shows an exemplary method of the present disclosure for estimating the content of degraded collagen in a pathological tissue specimen using CHPs. FIG. 1 illustrates a schematic of an exemplary process for how CHPs can be used to find the total amount of collagen (right) with heat denaturation, and subsequently determine the fraction of degraded collagen in the sample as a function of the total amount of collagen. Briefly, to determine the amount of disrupted collagen, a tissue sample is prepared on glass and stained with CHPs, which localize at regions of disrupted collagen. The tissue sample is imaged, for example, using fluorescence microscopy, and the fluorescence intensity is measured (FIG. 1, left). To determine the amount of total collagen, a serial tissue section or sample is prepared on glass and subjected to heat denaturation and/or antigen retrieval (e.g., heat induced epitope retrieval; HIER) Subsequently, the sample is processed identically to the sample in which disrupted collagen is being measured. Specifically, the sample is stained with CHPs and imaged (FIG. 1, right). Because the sample has been processed using HIER, the collagen in the sample is entirely disrupted, allowing the CHPs to bind and provide an optical signal corresponding to the total collagen in the sample.

[0041] FIG. 2A-C shows immunohistochemistry images of fibrotic human liver tissue. Methods of the present disclosure can be useful for researchers evaluating fibrotic conditions because the more severe the condition is, the more total collagen that will be present, which can provide insight into disease progression or serve as an additional biomarker for diagnosis. The total amount of collagen can be found by staining with CHPs after HIER There is significantly higher signal in HIER sample at 50 ms than the native (unheated; non-HIER) sample at 150 ms exposure. (A) shows an image of healthy liver tissue without heat-induced epitope retrieval (HIER) followed by treatment with CHPs at 50 ms exposure time, which yields no observable collagen signal. (B) shows 1× magnification images of fibrotic liver tissue with (left; HIER) and without (right; Native) HIER followed by treatment with CHPs. (C, top) shows 5× magnification images of the inset region of fibrotic liver tissue identified in panel B with (left) and without (right) HIER followed by treatment with CHPs. (C, bottom) shows 20× magnification images of the inset region of fibrotic liver tissue identified in the top row of panel C with (left) and without (right) HIER followed by treatment with CHPs. Samples processed with HIER show increased Cy5 signal corresponding to denatured collagen.

[0042] FIG. 3A-B shows a comparison of immunohistochemistry images of fibrotic liver tissue stained using a method of the present disclosure (HIER), hematoxylin and eosin (HE), or Masson's trichrome (Masson). (A) shows 1× magnification images of fibrotic liver tissue with HIER (top) followed by treatment with CHPs, fibrotic liver tissue stained with hematoxylin and eosin (HE), and fibrotic liver tissue stained with Masson's trichrome (Masson). (B, top) shows 5× magnification images of the inset region of fibrotic liver tissue identified in panel A with HIER followed by treatment with CHPs (left), fibrotic liver tissue identified in panel A with HE stain (middle), and fibrotic liver tissue identified in panel A with Masson's trichrome (right). (B, bottom) shows 20× magnification images of the inset region of fibrotic liver tissue identified in the top row of panel B with HIER followed by treatment with CHPs (left), fibrotic liver tissue identified in panel A with HE stain (middle), and fibrotic liver tissue identified in panel A with Masson's trichrome (right). Comparing CHP staining (HIER) with H&E and Masson's Trichrome staining, fibrotic collagen in the liver can be visualized more clearly and more easily with CHP staining (HIER).

[0043] In certain embodiments, methods of the present disclosure comprise CHP application during heat mediated antigen retrieval/heat-induced epitope retrieval (HIER) methods which fully denature the collagen within the tissue sections. This method has been shown to be successful using healthy rabbit skin tissues that vary in thickness, with results showing a near-linear correlation between collagen content and CHP signal intensity (FIG. 4).

[0044] In certain aspects, the present disclosure provides a method of measuring a total collagen content in a sample. Generally, total collagen content can refer to the total amount of collagen in a collagen-containing sample (e.g., tissue). Collagen content can refer to the weight of collagen in a sample, the volume of collagen in the sample, the fraction of a specific type of collagen (e.g., disrupted or denatured collagen) in a sample relative to the total amount of collagen in the sample. In some embodiments, determining collagen content can comprise determining an amount of total collagen in a sample (e.g., by intentionally denaturing native collagen). In other embodiments, determining collagen content can comprise determining an amount of disrupted collagen in a sample (e.g., as a fraction of the total collagen in the sample).

[0045] In some embodiments, a tissue sample is obtained from a subject with a condition. In some embodiments, the condition is selected from the group consisting of glycogen storage disease type III (GSD II), glycogen storage disease type VI (GSD VI), glycogen storage disease type IX (GSD IX), non-alcoholic steatohepatitis (NASH), cirrhosis, hepatitis, scleroderma, alcoholic fatty liver disease, non-alcoholic fatty liver disease, atherosclerosis, asthma, fibrosis, cardiac fibrosis, organ transplant fibrosis, muscle fibrosis, pancreatic fibrosis, bone-marrow fibrosis, liver fibrosis, cirrhosis of liver and gallbladder, fibrosis of the spleen, kidney fibrosis, pulmonary fibrosis, idiopathic pulmonary fibrosis, diffuse parenchymal lung disease, idiopathic interstitial fibrosis, diffuse interstitial fibrosis, interstitial pneumonitis, desquamative interstitial pneumonia, respiratory bronchiolitis, interstitial lung disease, chronic interstitial lung disease, acute interstitial pneumonitis, hypersensitivity pneumonitis, nonspecific interstitial pneumonia, cryptogenic organizing pneumonia, lymphocytic interstitial pneumonia, pneumoconiosis, silicosis, emphysema, interstitial fibrosis, sarcoidosis, mediastinal fibrosis, cardiac fibrosis, atrial fibrosis, endomyocardial fibrosis, myocardial infarction, renal fibrosis, chronic kidney disease, Type II diabetes, macular degeneration, age-related macular degeneration, keloid lesions, hypertrophic scar, nephrogenic systemic fibrosis, injection fibrosis, complications of surgery, fibrotic chronic allograft vasculopathy and/or chronic rejection in transplanted organs, fibrosis associated with ischemic reperfusion injury, post-vasectomy pain syndrome, fibrosis associated with rheumatoid arthritis, arthrofibrosis, Dupuytren's disease, dermatomyositis-polymyositis, mixed connective tissue disease, fibrous proliferative lesions of the oral cavity, fibrosing intestinal strictures, Crohn's disease, glial scarring, leptomeningeal fibrosis, meningitis, systemic lupus erythematosus, fibrosis due to radiation exposure, fibrosis due to mammary cystic rupture, myelofibrosis, retroperitoneal fibrosis, progressive massive fibrosis, a wound, wound healing, aged skin, osteoarthritis, or symptoms or sequelae thereof, or other diseases or conditions resulting disruption of extracellular matrix components (e.g., disruption of the triple helicity of collagen).

[0046] In some embodiments, the sample comprises a tissue sample, and the tissue sample has a thickness of between about 1 micrometer (μm) and about 100 μm. In some embodiments, the sample comprises a tissue sample, and the tissue sample has a thickness of about 1 μm, about 2 μm, about 3 μm, about 4 μm, about 5 μm, about 6 μm, about 7 μm, about 8 μm, about 9 μm, about 10 μm, about 11 μm, about 12 μm, about 13 μm, about 14 μm, about 15 μm, about 16 μm, about 17 μm, about 18 μm, about 19 μm, about 20 μm, about 25 μm, about 30 μm, about 35 μm, about 40 μm, about 45 μm, about 50 μm, about 60 μm, about 70 μm about 80 μm, about 90 μm, about 100 μm, about 200 μm, about 300 μm, about 400 μm, about 500 μm, about 600 μm about 700 μm, about 800 μm, about 900 μm, about 1 millimeter (mm), about 1.2 mm, about 1.4 mm, about 1.6 mm, about 1.8 mm, about 2 mm, about 2.2 mm, about 2.4 mm, about 2.6 mm, about 2.8 mm, about 3 mm, about 4 mm, about 5 mm, or a range of any two values thereof.

[0047] As used herein, a “biological organism” or “subject” can refer to a human or an animal or bacteria or cell cultures from any of the aforementioned groups. Non-limiting examples of animals include vertebrates such as a primate, a rodent, a domestic animal, or a game animal. Primates include chimpanzees, cynomolgus monkeys, spider monkeys, and macaques (e.g., Rhesus). Rodents include mice, rats, woodchucks, ferrets, rabbits, and hamsters. Domestic and game animals include cows, horses, pigs, deer, bison, buffalo, moose, feline species (e.g., domestic cat), and canine species (e.g., dog, fox, wolf). Fish including Chondrichthyes (cartilaginous fishes) and Osteichthyes (bony fishes). In certain embodiments, a biological organism or subject can refer to a zebrafish. The subject may be mammal. The mammal can be a human, non-human primate, mouse, rat, dog, cat, horse, or cow, but are not limited to these examples. In addition, the methods described herein can be used to diagnose and/or treat domesticated animals or pets. The term does not denote a particular age or sex. Thus, adult and newborn subjects, as well as fetuses, whether male or female, are intended to be included within the scope of this term.

[0048] A subject can be one who has been previously diagnosed with, identified as suffering from, and/or found to have a condition in need of treatment (e.g., fibrosis, wound/wound healing, idiopathic pulmonary fibrosis (IPF), aged skin, liver fibrosis, nonalcoholic steatohepatitis (NASH), nonalcoholic fatty liver disease (NAFLD), alcoholic fatty liver disease (AFLD), kidney fibrosis, myocardial infarction (MI), age-related macular degeneration (AMD), osteoarthritis (OA), keratoconus, or the like) or one or more complications related to the condition. In some embodiments, the condition is liver fibrosis. In some embodiments, the condition is nonalcoholic steatohepatitis (NASH). In some embodiments, the condition is nonalcoholic fatty liver disease (NAFLD). In some embodiments, the condition is alcoholic fatty liver disease (AFLD). The subject may optionally have already undergone treatment for the condition or the one or more complications related to the condition.

[0049] In some embodiments, the methods described herein can be used to determine presence or progression of the condition in a patient. In some embodiments, the total collagen content and the damaged collagen content are combined as a ratio for an objective measure of damaged collagen that is normalized to the specific sample group. In some embodiments, the ratio is used as predictive biomarker of progression or resolution in a diseased state.

[0050] In some embodiments, the method described herein may further comprise detecting total collagen content in another sample from the patient. In some embodiments, the method described herein may further comprise detecting non-triple helical collagen in the same sample or another sample from the patient by contacting the labeled CHPs to the non-triple helical collagen. The non-triple helical collagen is detected by the same procedure as detecting the triple helical collagen, except that no heat is added to denature the collagen. In additional embodiments, the method further comprises comparing the detected collagen content (e.g., total collagen, non-triple helical collagen, or both) in a sample with that in said another sample or with a control content value.

[0051] Alternatively, a subject can be one who has not been previously diagnosed as having a condition or one or more complications related to the condition. For example, a subject can be one who exhibits one or more risk factors for a condition or one or more complications related to the condition. The subject may not exhibit risk factors. A “subject in need” of treatment for a particular condition can be a subject suspected of having that condition, diagnosed as having that condition, already treated or being treated for that condition, not treated for that condition, or at risk of developing that condition.

[0052] The methods and systems described herein can be used to image a sample from various subjects, including but not limited to, humans and nonhuman primates such as chimpanzees and other ape and monkey species; farm animals such as cattle, sheep, pigs, goats, and horses; domestic mammals such as dogs and cats; laboratory animals including rodents such as mice, rats, guinea pigs, and zebra fish; and the like. The sample may be isolated from a subject (i.e., ex vivo). In other embodiments, the sample may be integral of a subject (i.e., in vivo or in situ).

[0053] In some embodiments, the method comprises denaturing collagen in the sample. It will be understood that any method known to a person of skill in the art may be used to denature a sample. Denaturing collagen in the sample can disrupt the triple helicity of the collagen in the sample.

[0054] In some embodiments, the method comprises denaturing collagen in the sample by antigen retrieval to produce a denatured sample. In some embodiments, the retrieval agent is an antigen retrieval agent which includes one or more of water, a buffer, an enzyme, a chaotropic reagent, a chelating agent, a nucleophile, an oxidizing agent, an organic acid/base pair, an electron-deficient compound such as a Lewis acid, and a surfactant. In some embodiments, the antigen retrieval agent includes at least two of water, a buffer, an enzyme, a chaotropic reagent, a chelating agent, a nucleophile, an oxidizing agent, an organic acid/base pair, an electron-deficient compound such as a Lewis acid, and a surfactant. In some embodiments, the antigen retrieval agent includes at least three of water, a buffer, an enzyme, a chaotropic reagent, a chelating agent, a nucleophile, an oxidizing agent, an organic acid/base pair, an electron-deficient compound such as a Lewis acid, and a surfactant. In some embodiments, the antigen retrieval agent includes a buffer (e.g. TRIS) and has a pH ranging from about 6 to about 9.

[0055] In some embodiments, the method comprises denaturing collagen in the sample by exposing the sample to heat. In some embodiments, the method comprises denaturing collagen in the sample by exposing the sample to microwaves. In some embodiments, the method comprises denaturing collagen in the sample by exposing the sample to ultrasound. In some embodiments, the sample is heated to between about 50 degrees Celsius (° C.) and about 160° C. In some embodiments, the sample is heated to about 50° C., about 55° C., about 60° C., about 65° C., about 70° C., about 75° C., about 80° C., about 85° C., about 90° C., about 95° C., about 100° C., about 105° C., about 110° C., about 115° C., about 120° C., about 125° C., about 130° C., about 135° C., about 140° C., about 145° C., about 150° C., about 155° C., about 160° C., or a range between any two values thereof. In some embodiments, when the sample is heating, it can be held under pressure to minimize evaporation of the antigen retrieval agent or mitigate or prevent the boiling of the antigen retrieval agent.

[0056] In some embodiments, the method comprises denaturing collagen in the sample by exposing the sample to heat, and the sample is heated for between about 10 seconds and about 45 minutes. In some embodiments, the method comprises denaturing collagen in the sample by exposing the sample to heat, and the sample is heated for about 10 seconds (s), about 20 s, about 30 s, about 40 s, about 50 s, about 1 minute (min), about 1.5 min, about 2 min, about 2.5 min, about 3 min, about 3.5 min, about 4 min, about 4.5 min, about 5 min, about 5.5 min, about 6 min, about 6.5 min, about 7 min, about 7.5 min, about 8 min, about 8.5 min, about 9 min, about 9.5 min, about 10 min, about 11 min, about 12 min, about 13 min, about 14 min, about 15 min, about 16 min, about 17 min, about 18 min, about 19 min, about 20 min, about 21 min, about 22 min, about 23 min, about 24 min, about 25 min, about 26 min, about 27 min, about 28 min, about 29 min, about 30 min, about 31 min, about 32 min, about 33 min, about 34 min, about 35 min, about 36 min, about 37 min, about 38 min, about 39 min, about 40 min, about 41 min, about 42 min, about 43 min, about 44 min, about 45 min or a range of any two values thereof.

[0057] In some embodiments, the method comprises denaturing collagen in the sample by exposing the sample to electromagnetic radiation. In some embodiments, the electromagnetic radiation has a wavelength of between about 10 nm and about 400 nm (UV radiation). In some embodiments, the electromagnetic radiation has a wavelength of between about 200 nm and about 400 nm. In some embodiments, the electromagnetic radiation has a wavelength of between about 250 nm and about 400 nm. In some embodiments, the electromagnetic radiation includes one or more of UVA radiation (having a wavelength ranging from about 315 nm to about 400 nm), UVB radiation (having a wavelength ranging from about 280 nm to about 315 nm), and UVC radiation (having a wavelength ranging from about100 nm to about 280 nm). The exposure time may be from about 10 min to about 2 hours, from about 10 minutes to about one hour, or from about 20 minutes to about 45 minutes. The power may be from about 1 J/cm² up to about 25 J/cm², from about 5 J/cm² up to about 15 J/cm², or from about 9 J/cm² up to about 12 J/cm² for UVA and from about 100 mJ/cm² to about 1 J/cm², from about 200 mJ/cm² to about 500 mJ/cm², or from about 250 mJ/cm² to about 350 mJ/cm² for UVB.

[0058] In some embodiments, the method comprises denaturing collagen using a method as described above, and the method also comprises antigen retrieval. In some embodiments, the denaturing and the antigen retrieval are performed simultaneously. In some embodiments, the denaturing and the antigen retrieval are performed sequentially. In some embodiments, the denaturing is performed before the antigen retrieval. In some embodiments, the denaturing is performed after the antigen retrieval.

[0059] In some embodiments, the method comprises denaturing collagen using a method as described above, and the method also comprises contacting labeled collagen hybridizing peptides (CHPs) to the denatured collagen. In some embodiments, the denaturing and contacting labeled collagen hybridizing peptides (CHPs) to the denatured collagen are performed simultaneously. In some embodiments, the denaturing and contacting labeled collagen hybridizing peptides (CHPs) to the denatured collagen are performed sequentially. In some embodiments, the denaturing is performed before contacting labeled collagen hybridizing peptides (CHPs) to the denatured collagen. In some embodiments, the denaturing is performed after contacting labeled collagen hybridizing peptides (CHPs) to the sample (e.g., incubating the sample in a solution comprising CHPs, and then heating the sample to denature the collagen). In one embodiment, a method of the present disclosure can comprise contacting an undenatured sample with labeled collagen hybridizing peptides (CHPs), and simultaneously imaging and heating the sample to obtain (e.g., in real-time) a change in the fluorescence intensity corresponding to a difference between an amount of disrupted collagen in the native sample and the total amount of collagen.

[0060] In some embodiments, when determining the total collagen content in a sample, the method comprises contacting labeled collagen hybridizing peptides (CHPs) to the denatured collagen (e.g., contacting the sample with CHPs after denaturing the collagen in the sample). In some embodiments, when determining the amount of disrupted collagen in the native sample, the method comprises contacting labeled collagen hybridizing peptides (CHPs) to the collagen in the native sample (e.g., contacting the sample with CHPs without denaturing the collagen in the sample).

[0061] Collagen content (e.g., total collagen content or an amount of disrupted collagen in the native sample) can be measured by detecting the intensity (or a change in intensity) of the optically detectable signal emitted from the label on the CHPs.

[0062] The methods and compositions disclosed herein make use of CHPs that include a detectable moiety (e.g., a label or tag). A label or tag allows for the detection of the labelled or tagged CHPs. A label or tag allows for the detection of disrupted collagen (e.g., CHP targets) in a sample when bound to a labelled or tagged CHPs. By label is meant a molecule that can be directly (i.e., a primary label) or indirectly (i.e., a secondary label) detected; for example, a label can be visualized and/or measured or otherwise identified so that its presence or absence can be known. A labelled or tagged CHP also allows for the detection of disrupted collagen (e.g., CHP targets) in a sample. A compound can be directly or indirectly conjugated to a label which provides a detectable signal, e.g. radioisotopes, fluorophores, enzymes, antibodies, particles such as magnetic particles, chemiluminescent compounds, or specific binding molecules, and the like. Examples of labels include, but are not limited to, optical fluorescent and chromogenic dyes including labels, label enzymes and radioisotopes.

[0063] Non-limiting examples of labels include: a) isotopic labels, which may be radioactive or heavy isotopes; b) magnetic labels, electrical labels, thermal labels; c) colored labels, optical labels including luminescent, phosphorous and fluorescent dyes or moieties; and d) binding partners. Labels also include enzymes (e.g. horseradish peroxidase, and the like.) and magnetic particles.

[0064] Labels include optical labels such as fluorescent dyes or moieties. Fluorophores are either “small molecule” fluors, or proteinaceous fluors (e.g. green fluorescent proteins and all variants thereof).

[0065] Suitable fluorescent labels include, but are not limited to, fluorescein, rhodamine, tetramethylrhodamine, eosin, erythrosin, coumarin, methyl-coumarins, pyrene, Malacite green, stilbene, Lucifer Yellow, Cascade Blue™, Texas Red, IAEDANS, EDANS, BODIPY FL, LC Red 640, Cy 5, Cy 5.5, LC Red 705 and Oregon green. Suitable optical dyes are described in the 1996 Molecular Probes Handbook by Richard P. Haugland. Suitable fluorescent labels also include, but are not limited to, green fluorescent protein (GFP; Chalfie, et al., Science 263(5148):802-805, 1994); and EGFP; Clontech—Genbank Accession Number U55762), blue fluorescent protein (BFP; Quantum Biotechnologies, Inc.; Stauber, R. H. Biotechniques 24(3):462-471 (1998); Heim, R. and Tsien, R. Y. Curr. Biol. 6:178-182 (1996)), enhanced yellow fluorescent protein (EYFP; Clontech Laboratories, Inc.), luciferase (Ichiki, et al., J. Immunol. 150(12):5408-5417 (1993)), β-galactosidase (Nolan, et al., Proc Natl Acad Sci USA 85(8):2603-2607 (April 1988)) and Renilla (WO 92/15673; WO 95/07463; WO 98/14605; WO 98/26277; WO 99/49019; U.S. Pat. Nos. 5,292,658; 5,418,155; 5,683,888; 5,741,668; 5,777,079; 5,804,387; 5,874,304; 5,876,995; and 5,925,558).

[0066] In some embodiments, labels include: Alexa-Fluor dyes (Alexa Fluor 350, Alexa Fluor 430, Alexa Fluor 488, Alexa Fluor 546, Alexa Fluor 568, Alexa Fluor 594, Alexa Fluor 633, Alexa Fluor 660, Alexa Fluor 680), Cascade Blue, Cascade Yellow and R-phycoerythrin (PE) (Molecular Probes) (Eugene, Oreg.), FITC, Rhodamine, and Texas Red (Pierce, Rockford, Ill.), cyanine 3 (Cy3), Cy5, Cy5.5, Cy7, Cy7.5 (Amersham Life Science, Pittsburgh, Pa.), Sulfo-Cyanine 3, Sulfo-Cyanine 5, Sulfo-Cyanine 5.5, Sulfo-Cyanine 7, Sulfo-Cyanine 7.5 (Lumiprobe, Hunt Valley, MD.). Tandem conjugate protocols for Cy5PE, Cy5.5PE, Cy7PE, Cy5.5APC, Cy7APC are known. Additional labels are available from commercial sources such as BD Biosciences, Beckman Coulter, AnaSpec, Invitrogen, Cell Signaling Technology, Millipore, eBioscience, Santa Cruz Biotech, Abcam, LiCor, and Sigma-Aldrich.

[0067] Fluorescent labels that are attached to CHPs can include dyes chosen for immunofluorescence that are excited by light of one wavelength (e.g., blue or green) and emit light of a different wavelength in the visible spectrum. The most common fluorescent dyes are fluorescein, which emits green light, Texas Red and Peridinn chlorophyll protein (PerCP), which emit red light, and rhodamine and phycoerythrin (PE) which emit orange/red light. By using selective filters, only the light coming from the dye or fluorochrome used is detected in the fluorescence microscope. This technique can be used to detect disrupted collagen (e.g., CHP targets) in a sample.

[0068] Confocal fluorescent microscopy, which uses computer-aided techniques to produce an ultrathin optical section of a cell or tissue, gives very high-resolution immunofluorescence microscopy without the need for elaborate sample preparation. The resolution of the confocal microscope can be further increased using low-intensity illumination so that two photons are required to excite the fluorochrome. A pulsed laser beam is used, and only when it is focused into the focal plane of the microscope is the intensity sufficient to excite fluorescence. In this way the fluorescence emission itself can be restricted to the optical section. In one embodiment, the use of a confocal fluorescent microscope allows for analysis of samples without any sample preparation.

[0069] One group of fluorophores that can be used as labels for CHPs of the present disclosure are xanthene dyes, which include the fluoresceins derived from 3,6-dihydroxy-9-henylxanthhydrol and resamines and rhodamines derived from 3,6-diamino-9-phenylxanthydrol and lissanime rhodamine B. The rhodamine and fluorescein derivatives of 9-o-carboxyphenylxanthhydrol have a 9-o-carboxyphenyl group. Fluorescein compounds having reactive coupling groups such as amino and isothiocyanate groups such as fluorescein isothiocyanate and fluorescamine are readily available. Another group of fluorescent compounds are the naphthylamines, having an amino group in the α- or β-position. In one aspect, CHPs are labeled with fluorochromes or chromophores by the procedures described by Goding, J. W. (Monoclonal Antibodies: Principles And Practice. New York: Academic Press (1983) pp 208-249).

[0070] In some embodiments, chemiluminescers such as luciferin are attached to the CHPs (See, e.g., U.S. Pat. No. 5,098,828, for synthesis and methods of detection).

[0071] In some embodiments, the CHPs comprises a secondary detectable label. A secondary label is one that is indirectly detected; for example, a secondary label can bind or react with a primary label for detection, can act on an additional product to generate a primary label (e.g. enzymes), and the like. Secondary labels include, but are not limited to, one of a binding partner pair; chemically modifiable moieties; nuclease inhibitors, enzymes such as horseradish peroxidase, alkaline phosphatases, luciferases, and the like.

[0072] In some embodiments, the secondary label is a binding partner pair. In one aspect, the label is a hapten or antigen, which will bind its binding partner. For example, suitable binding partner pairs include, but are not limited to: antigens (such as proteins (including peptides) and small molecules) and antibodies (including fragments thereof (FAbs, and the like.)); proteins and small molecules, including biotin/streptavidin; enzymes and substrates or inhibitors; other protein-protein interacting pairs; receptor-ligands; and carbohydrates and their binding partners. Nucleic acid-nucleic acid binding protein pairs are contemplated. Binding partner pairs include, but are not limited to, biotin (or imino-biotin) and streptavidin, and digeoxinin and antibodies (Abs).

[0073] In some embodiment, the secondary label is a chemically modifiable moiety. In this embodiment, labels comprising reactive functional groups are incorporated into the molecule to be labeled. The functional group is then subsequently labeled (e.g. either before or after the assay) with a primary label. Suitable functional groups include, but are not limited to, amino groups, carboxy groups, maleimide groups, oxo groups and thiol groups. For example, primary labels containing amino groups are attached to secondary labels comprising amino groups, for example using known linkers; for example, homo- or hetero-bifunctional linkers.

[0074] In some embodiments, multiple fluorescent labels are employed in the methods and compositions disclosed herein. In some embodiments, each label is distinct and distinguishable from other labels.

[0075] In some embodiments, CHPs are labeled with quantum dots as disclosed by Chattopadhyay, P. K. et al. Quantum dot semiconductor nanocrystals for immunophenotyping by polychromatic flow cytometry. Nat. Med. 12, 972-977 (2006).

[0076] In some embodiments, the CHPs are labeled with tags suitable for Inductively Coupled Plasma Mass Spectrometer (ICP-MS) as disclosed in Tanner et al. Spectrochimica Acta Part B: Atomic Spectroscopy, 2007 March; 62(3):188-195; Ornatsky et al, Translational Oncogenomics (2006):1, 1-9; Ornatsky et al, Multiple Cellular Antigen Detection by ICP-MS, J. Imm. Methods 308 (2006) 68-76; and Lou et al., Polymer-Based Elemental Tags for Sensitive Bioassays, Angew. Chem. Int. Ed., (2007) 46, 6111-6114.

[0077] In one aspect, the CHPs comprises an enzyme label. By enzyme label is meant an enzyme that may be reacted in the presence of a label enzyme substrate that produces a detectable product. Enzyme labels include, and are not limited to, phosphatases or peroxidases covalently linked to a CHPs. Suitable enzyme labels include, but are not limited to, horseradish peroxidase, alkaline phosphatase and glucose oxidase. The presence of the enzyme label is generally revealed through the enzyme's catalysis of a reaction with a label enzyme substrate, producing an identifiable product that is detected and measured. The identifiable product may be a color change, detected with the naked eye or by a spectrophotometric technique, or the signal may be conversion of the substrate to a product that is detected by fluorescence. Such products may be opaque, such as the reaction of horseradish peroxidase with tetramethyl benzedine and may have a variety of colors. Other label enzyme substrates, such as Luminol (available from Pierce Chemical Co.), have been developed that produce fluorescent reaction products. Methods for identifying label enzymes with label enzyme substrates are well known in the art and many commercial kits are available. Examples and methods for the use of various label enzymes are described in Savage et al., Previews 247:6-9 (1998), Young, J. Virol. Methods 24:227-236 (1989).

[0078] In one aspect, the CHPs comprise a radioisotope/radiolabel. By radioisotope is meant any radioactive molecule. Suitable radioisotopes include, but are not limited to 14C, 3H, 32P, 33P, 35S, 125I, 131I, 13N, 15O, 18F, 57Co, 99mTc and 51Cr. The radiolabel is attached to the CHP by covalent linkage. In one aspect, CHPs include a radiolabel. In such a case scintillation counting is used. In such a case, samples that have been exposed to the radiolabeled CHPs are isolated and radioactivity of the bound ligands is measured.

[0079] In some embodiments, positron emitting isotopes detectable by a positron emission tomography (“PET”) scanner are attached to a ligand. Examples of positron emitting isotopes include radioisotopes with short half-lives such as ¹¹C (^{˜}20 min), ¹³N (^{˜}10 min), ¹⁵O (^{˜}2 min), and ¹⁸F (^{˜}110 min). Methods for labeling of peptides with radioisotopes are known in the art. For example, such methods are found in Ohta et al., (1999) Molec. Cell 3:535-541. In some embodiments, CHPs are labeled with an NMR-active isotope label such as the ¹⁹F atom, or the ¹⁵N atom, or a plurality of such atoms.

[0080] In some embodiments, a method of the present disclosure comprises using a CHP. Generally, a CHP comprises a sequence represented by Formula I (SEQ ID NO: 352):

L-Sₘ-(Gly-X-Y)₃₋₂₀ (Formula I).

in which L is one or more detectable moieties (e.g., label); S is a spacer molecule and m is an integer from 0 to 10; and (Gly-X-Y)₃₋₂₀ (SEQ ID NO: 352) represents a repeating portion in which Gly is glycine; and at least one of X and Y is proline, modified proline, and/or hydroxyproline. In some embodiments, a method of the present disclosure comprise using a CHP comprising a sequence represented by L-Sₘ-(Gly-X-Y)₃, a sequence represented by L-Sₘ-(Gly-X-Y)₄ (SEQ ID NO: 351), a sequence represented by L-Sₘ-(Gly-X-Y)₅, (SEQ ID NO: 354) a sequence represented by L-Sₘ-(Gly-X-Y)₆ (SEQ ID NO: 355), a sequence represented by L-Sₘ-(Gly-X-Y)₇ (SEQ ID NO: 356), a sequence represented by L-Sₘ-(Gly-X-Y)₈ (SEQ ID NO: 357), a sequence represented by L-Sₘ-(Gly-X-Y)₉ (SEQ ID NO: 358), a sequence represented by L-Sₘ-(Gly-X-Y)₁₀ (SEQ ID NO: 359), a sequence represented by L-Sₘ-(Gly-X-Y)₁₁ (SEQ ID NO: 360), a sequence represented by L-Sₘ-(Gly-X-Y)₁₂ (SEQ ID NO: 361), a sequence represented by L-Sₘ-(Gly-X-Y)₁₃ (SEQ ID NO: 362), a sequence represented by L-Sₘ-(Gly-X-Y)₁₄ (SEQ ID NO: 363), a sequence represented by L-Sₘ-(Gly-X-Y)₁₅ (SEQ ID NO: 364), a sequence represented by L-Sₘ-(Gly-X-Y)₁₆ (SEQ ID NO: 365), a sequence represented by L-Sₘ-(Gly-X-Y)₁₇ (SEQ ID NO: 366), a sequence represented by L-Sₘ-(Gly-X-Y)₁₈ (SEQ ID NO: 367), a sequence represented by L-Sₘ-(Gly-X-Y)₁₉ (SEQ ID NO: 368), or a sequence represented by L-Sₘ-(Gly-X-Y)₂₀ (SEQ ID NO: 369), in which L is one or more detectable moieties (e.g., label); S is a spacer molecule and m is an integer from 0 to 10; Gly is glycine; and at least one of X and Y is proline, modified proline, and/or hydroxyproline. In some embodiments, m is not 0. In some embodiments, m is 1. In some embodiments, m is 2. In some embodiments, m is 3.

[0081] In some embodiments, a method of the present disclosure can comprise contacting a sample with a CHP having a sequence selected from SEQ ID NO.: 1-337 (see, e.g., Table 1).

TABLE 1
Sequences for Collagen Hybridizing Peptides

| Identifier | Sequence (One-Letter Amino Acid Symbols) |
|---|---|
| SEQ ID NO: 1 | Biotin-GGG-GPOGPOGPOGPOGPOGPOGPOGPOGPO-NH₂ |
| SEQ ID NO: 2 | 5(6)-Carboxyfluorescein-GGG-GPOGPOGPOGPOGPOGPOGPOGPOGPO-NH₂ |
| SEQ ID NO: 3 | Alexa Fluor-350-GGG-GPOGPOGPOGPOGPOGPOGPOGPOGPO-NH₂ |
| SEQ ID NO: 4 | Alexa Fluor-430-GGG-GPOGPOGPOGPOGPOGPOGPOGPOGPO-NH₂ |
| SEQ ID NO: 5 | Alexa Fluor-488-GGG-GPOGPOGPOGPOGPOGPOGPOGPOGPO-NH₂ |
| SEQ ID NO: 6 | Alexa Fluor-546-GGG-GPOGPOGPOGPOGPOGPOGPOGPOGPO-NH₂ |
| SEQ ID NO: 7 | Alexa Fluor-568-GGG-GPOGPOGPOGPOGPOGPOGPOGPOGPO-NH₂ |
| SEQ ID NO: 8 | Alexa Fluor-594-GGG-GPOGPOGPOGPOGPOGPOGPOGPOGPO-NH₂ |
| SEQ ID NO: 9 | Alexa Fluor-633-GGG-GPOGPOGPOGPOGPOGPOGPOGPOGPO-NH₂ |
| SEQ ID NO: 10 | Alexa Fluor-660-GGG-GPOGPOGPOGPOGPOGPOGPOGPOGPO-NH₂ |
| SEQ ID NO: 11 | Alexa Fluor-680-GGG-GPOGPOGPOGPOGPOGPOGPOGPOGPO-NH₂ |
| SEQ ID NO: 12 | Cyanine 3-GGG-GPOGPOGPOGPOGPOGPOGPOGPOGPO-NH₂ |
| SEQ ID NO: 13 | Cyanine 5-GGG-GPOGPOGPOGPOGPOGPOGPOGPOGPO-NH₂ |
| SEQ ID NO: 14 | Cyanine 5.5-GGG-GPOGPOGPOGPOGPOGPOGPOGPOGPO-NH₂ |
| SEQ ID NO: 15 | Cyanine 7-GGG-GPOGPOGPOGPOGPOGPOGPOGPOGPO-NH₂ |
| SEQ ID NO: 16 | Cyanine 7.5-GGG-GPOGPOGPOGPOGPOGPOGPOGPOGPO-NH₂ |
| SEQ ID NO: 17 | Cyanine 3-phycoerythrin-GGG-GPOGPOGPOGPOGPOGPOGPOGPOGPO-NH₂ |
| SEQ ID NO: 18 | Cyanine 5-phycoerythrin-GGG-GPOGPOGPOGPOGPOGPOGPOGPOGPO-NH₂ |
| SEQ ID NO: 19 | Cyanine 5.5-phycoerythrin-GGG-GPOGPOGPOGPOGPOGPOGPOGPOGPO-NH₂ |
| SEQ ID NO: 20 | Cyanine 7-phycoerythrin-GGG-GPOGPOGPOGPOGPOGPOGPOGPOGPO-NH₂ |
| SEQ ID NO: 21 | Cyanine 7.5-phycoerythrin-GGG-GPOGPOGPOGPOGPOGPOGPOGPOGPO-NH₂ |
| SEQ ID NO: 22 | Rhodamine-GGG-GPOGPOGPOGPOGPOGPOGPOGPOGPO-NH₂ |
| SEQ ID NO: 23 | Sulfo-Cyanine3-GGG-GPOGPOGPOGPOGPOGPOGPOGPOGPO-NH₂ |
| SEQ ID NO: 24 | Sulfo-Cyanine5-GGG-GPOGPOGPOGPOGPOGPOGPOGPOGPO-NH₂ |
| SEQ ID NO: 25 | Sulfo-Cyanine5.5-GGG-GPOGPOGPOGPOGPOGPOGPOGPOGPO-NH₂ |
| SEQ ID NO: 26 | Sulfo-Cyanine7-GGG-GPOGPOGPOGPOGPOGPOGPOGPOGPO-NH₂ |
| SEQ ID NO: 27 | Sulfo-Cyanine7.5-GGG-GPOGPOGPOGPOGPOGPOGPOGPOGPO-NH₂ |
| SEQ ID NO: 28 | Texas Red-GGG-GPOGPOGPOGPOGPOGPOGPOGPOGPO-NH₂ |
| SEQ ID NO: 29 | Biotin-GGG-GfOGfOGfOGfOGfOGfOGfOGfOGfO-NH₂ |
| SEQ ID NO: 30 | 5(6)-Carboxyfluorescein-GGG-GfOGfOGfOGfOGfOGfOGfOGfOGfO-NH₂ |
| SEQ ID NO: 31 | Alexa Fluor-350-GGG-GfOGfOGfOGfOGfOGfOGfOGfOGfO-NH₂ |
| SEQ ID NO: 32 | Alexa Fluor-430-GGG-GfOGfOGfOGfOGfOGfOGfOGfOGfO-NH₂ |
| SEQ ID NO: 33 | Alexa Fluor-488-GGG-GfOGfOGfOGfOGfOGfOGfOGfOGfO-NH₂ |
| SEQ ID NO: 34 | Alexa Fluor-546-GGG-GfOGfOGfOGfOGfOGfOGfOGfOGfO-NH₂ |
| SEQ ID NO: 35 | Alexa Fluor-568-GGG-GfOGfOGfOGfOGfOGfOGfOGfOGfO-NH₂ |
| SEQ ID NO: 36 | Alexa Fluor-594-GGG-GfOGfOGfOGfOGfOGfOGfOGfOGfO-NH₂ |
| SEQ ID NO: 37 | Alexa Fluor-633-GGG-GfOGfOGfOGfOGfOGfOGfOGfOGfO-NH₂ |
| SEQ ID NO: 38 | Alexa Fluor-660-GGG-GfOGfOGfOGfOGfOGfOGfOGfOGfO-NH₂ |
| SEQ ID NO: 39 | Alexa Fluor-680-GGG-GfOGfOGfOGfOGfOGfOGfOGfOGfO-NH₂ |
| SEQ ID NO: 40 | Cyanine 3-GGG-GfOGfOGfOGfOGfOGfOGfOGfOGfO-NH₂ |
| SEQ ID NO: 41 | Cyanine 5-GGG-GfOGfOGfOGfOGfOGfOGfOGfOGfO-NH₂ |
| SEQ ID NO: 42 | Cyanine 5.5-GGG-GfOGfOGfOGfOGfOGfOGfOGfOGfO-NH₂ |
| SEQ ID NO: 43 | Cyanine 7-GGG-GfOGfOGfOGfOGfOGfOGfOGfOGfO-NH₂ |
| SEQ ID NO: 44 | Cyanine 7.5-GGG-GfOGfOGfOGfOGfOGfOGfOGfOGfO-NH₂ |
| SEQ ID NO: 45 | Cyanine 3-phycoerythrin-GGG-GfOGfOGfOGfOGfOGfOGfOGfOGfO-NH₂ |
| SEQ ID NO: 46 | Cyanine 5-phycoerythrin-GGG-GfOGfOGfOGfOGfOGfOGfOGfOGfO-NH₂ |
| SEQ ID NO: 47 | Cyanine 5.5-phycoerythrin-GGG-GfOGfOGfOGfOGfOGfOGfOGfOGfO-NH₂ |
| SEQ ID NO: 48 | Cyanine 7-phycoerythrin-GGG-GfOGfOGfOGfOGfOGfOGfOGfOGfO-NH₂ |
| SEQ ID NO: 49 | Cyanine 7.5-phycoerythrin-GGG-GfOGfOGfOGfOGfOGfOGfOGfOGfO-NH₂ |
| SEQ ID NO: 50 | Rhodamine-GGG-GfOGfOGfOGfOGfOGfOGfOGfOGfO-NH₂ |
| SEQ ID NO: 51 | Sulfo-Cyanine3-GGG-GfOGfOGfOGfOGfOGfOGfOGfOGfO-NH₂ |
| SEQ ID NO: 52 | Sulfo-Cyanine5-GGG-GfOGfOGfOGfOGfOGfOGfOGfOGfO-NH₂ |
| SEQ ID NO: 53 | Sulfo-Cyanine5.5-GGG-GfOGfOGfOGfOGfOGfOGfOGfOGfO-NH₂ |
| SEQ ID NO: 54 | Sulfo-Cyanine7-GGG-GfOGfOGfOGfOGfOGfOGfOGfOGfO-NH₂ |
| SEQ ID NO: 55 | Sulfo-Cyanine7.5-GGG-GfOGfOGfOGfOGfOGfOGfOGfOGfO-NH₂ |
| SEQ ID NO: 56 | Texas Red-GGG-GfOGfOGfOGfOGfOGfOGfOGfOGfO-NH₂ |
| SEQ ID NO: 57 | Biotin-Ahx-GPOGPOGPOGPOGPOGPOGPOGPOGPO-NH₂ |
| SEQ ID NO: 58 | 5(6)-Carboxyfluorescein-Ahx-GPOGPOGPOGPOGPOGPOGPOGPOGPO-NH₂ |
| SEQ ID NO: 59 | Alexa Fluor-350-Ahx-GPOGPOGPOGPOGPOGPOGPOGPOGPO-NH₂ |
| SEQ ID NO: 60 | Alexa Fluor-430-Ahx-GPOGPOGPOGPOGPOGPOGPOGPOGPO-NH₂ |
| SEQ ID NO: 61 | Alexa Fluor-488-Ahx-GPOGPOGPOGPOGPOGPOGPOGPOGPO-NH₂ |
| SEQ ID NO: 62 | Alexa Fluor-546-Ahx-GPOGPOGPOGPOGPOGPOGPOGPOGPO-NH₂ |
| SEQ ID NO: 63 | Alexa Fluor-568-Ahx-GPOGPOGPOGPOGPOGPOGPOGPOGPO-NH₂ |
| SEQ ID NO: 64 | Alexa Fluor-594-Ahx-GPOGPOGPOGPOGPOGPOGPOGPOGPO-NH₂ |
| SEQ ID NO: 65 | Alexa Fluor-633-Ahx-GPOGPOGPOGPOGPOGPOGPOGPOGPO-NH₂ |
| SEQ ID NO: 66 | Alexa Fluor-660-Ahx-GPOGPOGPOGPOGPOGPOGPOGPOGPO-NH₂ |
| SEQ ID NO: 67 | Alexa Fluor-680-Ahx-GPOGPOGPOGPOGPOGPOGPOGPOGPO-NH₂ |
| SEQ ID NO: 68 | Cyanine 3-Ahx-GPOGPOGPOGPOGPOGPOGPOGPOGPO-NH₂ |
| SEQ ID NO: 69 | Cyanine 5-Ahx-GPOGPOGPOGPOGPOGPOGPOGPOGPO-NH₂ |
| SEQ ID NO: 70 | Cyanine 5.5-Ahx-GPOGPOGPOGPOGPOGPOGPOGPOGPO-NH₂ |
| SEQ ID NO: 71 | Cyanine 7-Ahx-GPOGPOGPOGPOGPOGPOGPOGPOGPO-NH₂ |
| SEQ ID NO: 72 | Cyanine 7.5-Ahx-GPOGPOGPOGPOGPOGPOGPOGPOGPO-NH₂ |
| SEQ ID NO: 73 | Cyanine 3-phycoerythrin-Ahx-GPOGPOGPOGPOGPOGPOGPOGPOGPO-NH₂ |
| SEQ ID NO: 74 | Cyanine 5-phycoerythrin-Ahx-GPOGPOGPOGPOGPOGPOGPOGPOGPO-NH₂ |
| SEQ ID NO: 75 | Cyanine 5.5-phycoerythrin-Ahx-GPOGPOGPOGPOGPOGPOGPOGPOGPO-NH₂ |
| SEQ ID NO: 76 | Cyanine 7-phycoerythrin-Ahx-GPOGPOGPOGPOGPOGPOGPOGPOGPO-NH₂ |
| SEQ ID NO: 77 | Cyanine 7.5-phycoerythrin-Ahx-GPOGPOGPOGPOGPOGPOGPOGPOGPO-NH₂ |
| SEQ ID NO: 78 | Rhodamine-Ahx-GPOGPOGPOGPOGPOGPOGPOGPOGPO-NH₂ |
| SEQ ID NO: 79 | Sulfo-Cyanine3-Ahx-GPOGPOGPOGPOGPOGPOGPOGPOGPO-NH₂ |
| SEQ ID NO: 80 | Sulfo-Cyanine5-Ahx-GPOGPOGPOGPOGPOGPOGPOGPOGPO-NH₂ |
| SEQ ID NO: 81 | Sulfo-Cyanine5.5-Ahx-GPOGPOGPOGPOGPOGPOGPOGPOGPO-NH₂ |
| SEQ ID NO: 82 | Sulfo-Cyanine7-Ahx-GPOGPOGPOGPOGPOGPOGPOGPOGPO-NH₂ |
| SEQ ID NO: 83 | Sulfo-Cyanine7.5-Ahx-GPOGPOGPOGPOGPOGPOGPOGPOGPO-NH₂ |
| SEQ ID NO: 84 | Texas Red-Ahx-GPOGPOGPOGPOGPOGPOGPOGPOGPO-NH₂ |
| SEQ ID NO: 85 | Biotin-Ahx-GfOGfOGfOGfOGfOGfOGfOGfOGfO-NH₂ |
| SEQ ID NO: 86 | 5(6)-Carboxyfluorescein-Ahx-GfOGfOGfOGfOGfOGfOGfOGfOGfO-NH₂ |
| SEQ ID NO: 87 | Alexa Fluor-350-Ahx-GfOGfOGfOGfOGfOGfOGfOGfOGfO-NH₂ |
| SEQ ID NO: 88 | Alexa Fluor-430-Ahx-GfOGfOGfOGfOGfOGfOGfOGfOGfO-NH₂ |
| SEQ ID NO: 89 | Alexa Fluor-488-Ahx-GfOGfOGfOGfOGfOGfOGfOGfOGfO-NH₂ |
| SEQ ID NO: 90 | Alexa Fluor-546-Ahx-GfOGfOGfOGfOGfOGfOGfOGfOGfO-NH₂ |
| SEQ ID NO: 91 | Alexa Fluor-568-Ahx-GfOGfOGfOGfOGfOGfOGfOGfOGfO-NH₂ |
| SEQ ID NO: 92 | Alexa Fluor-594-Ahx-GfOGfOGfOGfOGfOGfOGfOGfOGfO-NH₂ |
| SEQ ID NO: 93 | Alexa Fluor-633-Ahx-GfOGfOGfOGfOGfOGfOGfOGfOGfO-NH₂ |
| SEQ ID NO: 94 | Alexa Fluor-660-Ahx-GfOGfOGfOGfOGfOGfOGfOGfOGfO-NH₂ |
| SEQ ID NO: 95 | Alexa Fluor-680-Ahx-GfOGfOGfOGfOGfOGfOGfOGfOGfO-NH₂ |
| SEQ ID NO: 96 | Cyanine 3-Ahx-GfOGfOGfOGfOGfOGfOGfOGfOGfO-NH₂ |
| SEQ ID NO: 97 | Cyanine 5-Ahx-GfOGfOGfOGfOGfOGfOGfOGfOGfO-NH₂ |
| SEQ ID NO: 98 | Cyanine 5.5-Ahx-GfOGfOGfOGfOGfOGfOGfOGfOGfO-NH₂ |
| SEQ ID NO: 99 | Cyanine 7-Ahx-GfOGfOGfOGfOGfOGfOGfOGfOGfO-NH₂ |
| SEQ ID NO: 100 | Cyanine 7.5-Ahx-GfOGfOGfOGfOGfOGfOGfOGfOGfO-NH₂ |
| SEQ ID NO: 101 | Cyanine 3-phycoerythrin-Ahx-GfOGfOGfOGfOGfOGfOGfOGfOGfO-NH₂ |
| SEQ ID NO: 102 | Cyanine 5-phycoerythrin-Ahx-GfOGfOGfOGfOGfOGfOGfOGfOGfO-NH₂ |
| SEQ ID NO: 103 | Cyanine 5.5-phycoerythrin-Ahx-GfOGfOGfOGfOGfOGfOGfOGfOGfO-NH₂ |
| SEQ ID NO: 104 | Cyanine 7-phycoerythrin-Ahx-GfOGfOGfOGfOGfOGfOGfOGfOGfO-NH₂ |
| SEQ ID NO: 105 | Cyanine 7.5-phycoerythrin-Ahx-GfOGfOGfOGfOGfOGfOGfOGfOGfO-NH₂ |
| SEQ ID NO: 106 | Rhodamine-Ahx-GfOGfOGfOGfOGfOGfOGfOGfOGfO-NH₂ |
| SEQ ID NO: 107 | Sulfo-Cyanine3-Ahx-GfOGfOGfOGfOGfOGfOGfOGfOGfO-NH₂ |
| SEQ ID NO: 108 | Sulfo-Cyanine5-Ahx-GfOGfOGfOGfOGfOGfOGfOGfOGfO-NH₂ |
| SEQ ID NO: 109 | Sulfo-Cyanine5.5-Ahx-GfOGfOGfOGfOGfOGfOGfOGfOGfO-NH₂ |
| SEQ ID NO: 110 | Sulfo-Cyanine7-Ahx-GfOGfOGfOGfOGfOGfOGfOGfOGfO-NH₂ |
| SEQ ID NO: 111 | Sulfo-Cyanine7.5-Ahx-GfOGfOGfOGfOGfOGfOGfOGfOGfO-NH₂ |
| SEQ ID NO: 112 | Texas Red-Ahx-GfOGfOGfOGfOGfOGfOGfOGfOGfO-NH₂ |
| SEQ ID NO: 113 | Biotin-Ahx-GcOGcOGcOGcOGcOGcOGcOGcOGcO-NH₂ |
| SEQ ID NO: 114 | 5(6)-Carboxyfluorescein-Ahx-GcOGcOGcOGcOGcOGcOGcOGcOGcO-NH₂ |
| SEQ ID NO: 115 | Alexa Fluor-350-Ahx-GcOGcOGcOGcOGcOGcOGcOGcOGcO-NH₂ |
| SEQ ID NO: 116 | Alexa Fluor-430-Ahx-GcOGcOGcOGcOGcOGcOGcOGcOGcO-NH₂ |
| SEQ ID NO: 117 | Alexa Fluor-488-Ahx-GcOGcOGcOGcOGcOGcOGcOGcOGcO-NH₂ |
| SEQ ID NO: 118 | Alexa Fluor-546-Ahx-GcOGcOGcOGcOGcOGcOGcOGcOGcO-NH₂ |
| SEQ ID NO: 119 | Alexa Fluor-568-Ahx-GcOGcOGcOGcOGcOGcOGcOGcOGcO-NH₂ |
| SEQ ID NO: 120 | Alexa Fluor-594-Ahx-GcOGcOGcOGcOGcOGcOGcOGcOGcO-NH₂ |
| SEQ ID NO: 121 | Alexa Fluor-633-Ahx-GcOGcOGcOGcOGcOGcOGcOGcOGcO-NH₂ |
| SEQ ID NO: 122 | Alexa Fluor-660-Ahx-GcOGcOGcOGcOGcOGcOGcOGcOGcO-NH₂ |
| SEQ ID NO: 123 | Alexa Fluor-680-Ahx-GcOGcOGcOGcOGcOGcOGcOGcOGcO-NH₂ |
| SEQ ID NO: 124 | Cyanine 3-Ahx-GcOGcOGcOGcOGcOGcOGcOGcOGcO-NH₂ |
| SEQ ID NO: 125 | Cyanine 5-Ahx-GcOGcOGcOGcOGcOGcOGcOGcOGcO-NH₂ |
| SEQ ID NO: 126 | Cyanine 5.5-Ahx-GcOGcOGcOGcOGcOGcOGcOGcOGcO-NH₂ |
| SEQ ID NO: 127 | Cyanine 7-Ahx-GcOGcOGcOGcOGcOGcOGcOGcOGcO-NH₂ |
| SEQ ID NO: 128 | Cyanine 7.5-Ahx-GcOGcOGcOGcOGcOGcOGcOGcOGcO-NH₂ |
| SEQ ID NO: 129 | Cyanine 3-phycoerythrin-Ahx-GcOGcOGcOGcOGcOGcOGcOGcOGcO-NH₂ |
| SEQ ID NO: 130 | Cyanine 5-phycoerythrin-Ahx-GcOGcOGcOGcOGcOGcOGcOGcOGcO-NH₂ |
| SEQ ID NO: 131 | Cyanine 5.5-phycoerythrin-Ahx-GcOGcOGcOGcOGcOGcOGcOGcOGcO-NH₂ |
| SEQ ID NO: 132 | Cyanine 7-phycoerythrin-Ahx-GcOGcOGcOGcOGcOGcOGcOGcOGcO-NH₂ |
| SEQ ID NO: 134 | Cyanine 7.5-phycoerythrin-Ahx-GcOGcOGcOGcOGcOGcOGcOGcOGcO-NH₂ |
| SEQ ID NO: 135 | Rhodamine-Ahx-GcOGcOGcOGcOGcOGcOGcOGcOGcO-NH₂ |
| SEQ ID NO: 136 | Sulfo-Cyanine3-Ahx-GcOGcOGcOGcOGcOGcOGcOGcOGcO-NH₂ |
| SEQ ID NO: 137 | Sulfo-Cyanine5-Ahx-GcOGcOGcOGcOGcOGcOGcOGcOGcO-NH₂ |
| SEQ ID NO: 138 | Sulfo-Cyanine5.5-Ahx-GcOGcOGcOGcOGcOGcOGcOGcOGcO-NH₂ |
| SEQ ID NO: 139 | Sulfo-Cyanine7-Ahx-GcOGcOGcOGcOGcOGcOGcOGcOGcO-NH₂ |
| SEQ ID NO: 140 | Sulfo-Cyanine7.5-Ahx-GcOGcOGcOGcOGcOGcOGcOGcOGcO-NH₂ |
| SEQ ID NO: 141 | Texas Red-Ahx-GcOGcOGcOGcOGcOGcOGcOGcOGcO-NH₂ |
| SEQ ID NO: 142 | Biotin-GGG-GcOGcOGcOGcOGcOGcOGcOGcOGcO-NH₂ |
| SEQ ID NO: 143 | 5(6)-Carboxyfluorescein-GGG-GcOGcOGcOGcOGcOGcOGcOGcOGcO-NH₂ |
| SEQ ID NO: 144 | Alexa Fluor-350-GGG-GcOGcOGcOGcOGcOGcOGcOGcOGcO-NH₂ |
| SEQ ID NO: 145 | Alexa Fluor-430-GGG-GcOGcOGcOGcOGcOGcOGcOGcOGcO-NH₂ |
| SEQ ID NO: 146 | Alexa Fluor-488-GGG-GcOGcOGcOGcOGcOGcOGcOGcOGcO-NH₂ |
| SEQ ID NO: 147 | Alexa Fluor-546-GGG-GcOGcOGcOGcOGcOGcOGcOGcOGcO-NH₂ |
| SEQ ID NO: 148 | Alexa Fluor-568-GGG-GcOGcOGcOGcOGcOGcOGcOGcOGcO-NH₂ |
| SEQ ID NO: 149 | Alexa Fluor-594-GGG-GcOGcOGcOGcOGcOGcOGcOGcOGcO-NH₂ |
| SEQ ID NO: 150 | Alexa Fluor-633-GGG-GcOGcOGcOGcOGcOGcOGcOGcOGcO-NH₂ |
| SEQ ID NO: 151 | Alexa Fluor-660-GGG-GcOGcOGcOGcOGcOGcOGcOGcOGcO-NH₂ |
| SEQ ID NO: 152 | Alexa Fluor-680-GGG-GcOGcOGcOGcOGcOGcOGcOGcOGcO-NH₂ |
| SEQ ID NO: 153 | Cyanine 3-GGG-GcOGcOGcOGcOGcOGcOGcOGcOGcO-NH₂ |
| SEQ ID NO: 154 | Cyanine 5-GGG-GcOGcOGcOGcOGcOGcOGcOGcOGcO-NH₂ |
| SEQ ID NO: 155 | Cyanine 5.5-GGG-GcOGcOGcOGcOGcOGcOGcOGcOGcO-NH₂ |
| SEQ ID NO: 156 | Cyanine 7-GGG-GcOGcOGcOGcOGcOGcOGcOGcOGcO-NH₂ |
| SEQ ID NO: 157 | Cyanine 7.5-GGG-GcOGcOGcOGcOGcOGcOGcOGcOGcO-NH₂ |
| SEQ ID NO: 158 | Cyanine 3-phycoerythrin-GGG-GcOGcOGcOGcOGcOGcOGcOGcOGcO-NH₂ |
| SEQ ID NO: 159 | Cyanine 5-phycoerythrin-GGG-GcOGcOGcOGcOGcOGcOGcOGcOGcO-NH₂ |
| SEQ ID NO: 160 | Cyanine 5.5-phycoerythrin-GGG-GcOGcOGcOGcOGcOGcOGcOGcOGcO-NH₂ |
| SEQ ID NO: 161 | Cyanine 7-phycoerythrin-GGG-GcOGcOGcOGcOGcOGcOGcOGcOGcO-NH₂ |
| SEQ ID NO: 162 | Cyanine 7.5-phycoerythrin-GGG-GcOGcOGcOGcOGcOGcOGcOGcOGcO-NH₂ |
| SEQ ID NO: 163 | Rhodamine-GGG-GcOGcOGcOGcOGcOGcOGcOGcOGcO-NH₂ |
| SEQ ID NO: 164 | Sulfo-Cyanine3-GGG-GcOGcOGcOGcOGcOGcOGcOGcOGcO-NH₂ |
| SEQ ID NO: 165 | Sulfo-Cyanine5-GGG-GcOGcOGcOGcOGcOGcOGcOGcOGcO-NH₂ |
| SEQ ID NO: 166 | Sulfo-Cyanine5.5-GGG-GcOGcOGcOGcOGcOGcOGcOGcOGcO-NH₂ |
| SEQ ID NO: 167 | Sulfo-Cyanine7-GGG-GcOGcOGcOGcOGcOGcOGcOGcOGcO-NH₂ |
| SEQ ID NO: 168 | Sulfo-Cyanine7.5-GGG-GcOGcOGcOGcOGcOGcOGcOGcOGcO-NH₂ |
| SEQ ID NO: 169 | Texas Red-GGG-GcOGcOGcOGcOGcOGcOGcOGcOGcO-NH₂ |
| SEQ ID NO: 170 | Biotin-GGG-GOPGOPGOPGOPGOPGOPGOPGOPGOP-NH₂ |
| SEQ ID NO: 171 | 5(6)-Carboxyfluorescein-GGG-GOPGOPGOPGOPGOPGOPGOPGOPGOP-NH₂ |
| SEQ ID NO: 172 | Alexa Fluor-350-GGG-GOPGOPGOPGOPGOPGOPGOPGOPGOP-NH₂ |
| SEQ ID NO: 173 | Alexa Fluor-430-GGG-GOPGOPGOPGOPGOPGOPGOPGOPGOP-NH₂ |
| SEQ ID NO: 174 | Alexa Fluor-488-GGG-GOPGOPGOPGOPGOPGOPGOPGOPGOP-NH₂ |
| SEQ ID NO: 175 | Alexa Fluor-546-GGG-GOPGOPGOPGOPGOPGOPGOPGOPGOP-NH₂ |
| SEQ ID NO: 176 | Alexa Fluor-568-GGG-GOPGOPGOPGOPGOPGOPGOPGOPGOP-NH₂ |
| SEQ ID NO: 177 | Alexa Fluor-594-GGG-GOPGOPGOPGOPGOPGOPGOPGOPGOP-NH₂ |
| SEQ ID NO: 178 | Alexa Fluor-633-GGG-GOPGOPGOPGOPGOPGOPGOPGOPGOP-NH₂ |
| SEQ ID NO: 179 | Alexa Fluor-660-GGG-GOPGOPGOPGOPGOPGOPGOPGOPGOP-NH₂ |
| SEQ ID NO: 180 | Alexa Fluor-680-GGG-GOPGOPGOPGOPGOPGOPGOPGOPGOP-NH₂ |
| SEQ ID NO: 181 | Cyanine 3-GGG-GOPGOPGOPGOPGOPGOPGOPGOPGOP-NH₂ |
| SEQ ID NO: 182 | Cyanine 5-GGG-GOPGOPGOPGOPGOPGOPGOPGOPGOP-NH₂ |
| SEQ ID NO: 183 | Cyanine 5.5-GGG-GOPGOPGOPGOPGOPGOPGOPGOPGOP-NH₂ |
| SEQ ID NO: 184 | Cyanine 7-GGG-GOPGOPGOPGOPGOPGOPGOPGOPGOP-NH₂ |
| SEQ ID NO: 185 | Cyanine 7.5-GGG-GOPGOPGOPGOPGOPGOPGOPGOPGOP-NH₂ |
| SEQ ID NO: 186 | Cyanine 3-phycoerythrin-GGG-GOPGOPGOPGOPGOPGOPGOPGOPGOP-NH₂ |
| SEQ ID NO: 187 | Cyanine 5-phycoerythrin-GGG-GOPGOPGOPGOPGOPGOPGOPGOPGOP-NH₂ |
| SEQ ID NO: 188 | Cyanine 5.5-phycoerythrin-GGG-GOPGOPGOPGOPGOPGOPGOPGOPGOP-NH₂ |
| SEQ ID NO: 189 | Cyanine 7-phycoerythrin-GGG-GOPGOPGOPGOPGOPGOPGOPGOPGOP-NH₂ |
| SEQ ID NO: 190 | Cyanine 7.5-phycoerythrin-GGG-GOPGOPGOPGOPGOPGOPGOPGOPGOP-NH₂ |
| SEQ ID NO: 191 | Rhodamine-GGG-GOPGOPGOPGOPGOPGOPGOPGOPGOP-NH₂ |
| SEQ ID NO: 192 | Sulfo-Cyanine3-GGG-GOPGOPGOPGOPGOPGOPGOPGOPGOP-NH₂ |
| SEQ ID NO: 193 | Sulfo-Cyanine5-GGG-GOPGOPGOPGOPGOPGOPGOPGOPGOP-NH₂ |
| SEQ ID NO: 194 | Sulfo-Cyanine5.5-GGG-GOPGOPGOPGOPGOPGOPGOPGOPGOP-NH₂ |
| SEQ ID NO: 195 | Sulfo-Cyanine7-GGG-GOPGOPGOPGOPGOPGOPGOPGOPGOP-NH₂ |
| SEQ ID NO: 196 | Sulfo-Cyanine7.5-GGG-GOPGOPGOPGOPGOPGOPGOPGOPGOP-NH₂ |
| SEQ ID NO: 197 | Texas Red-GGG-GOPGOPGOPGOPGOPGOPGOPGOPGOP-NH₂ |
| SEQ ID NO: 198 | Biotin-Ahx-GOPGOPGOPGOPGOPGOPGOPGOPGOP-NH₂ |
| SEQ ID NO: 199 | 5(6)-Carboxyfluorescein-Ahx-GOPGOPGOPGOPGOPGOPGOPGOPGOP-NH₂ |
| SEQ ID NO: 200 | Alexa Fluor-350-Ahx-GOPGOPGOPGOPGOPGOPGOPGOPGOP-NH₂ |
| SEQ ID NO: 201 | Alexa Fluor-430-Ahx-GOPGOPGOPGOPGOPGOPGOPGOPGOP-NH₂ |
| SEQ ID NO: 202 | Alexa Fluor-488-Ahx-GOPGOPGOPGOPGOPGOPGOPGOPGOP-NH₂ |
| SEQ ID NO: 203 | Alexa Fluor-546-Ahx-GOPGOPGOPGOPGOPGOPGOPGOPGOP-NH₂ |
| SEQ ID NO: 204 | Alexa Fluor-568-Ahx-GOPGOPGOPGOPGOPGOPGOPGOPGOP-NH₂ |
| SEQ ID NO: 205 | Alexa Fluor-594-Ahx-GOPGOPGOPGOPGOPGOPGOPGOPGOP-NH₂ |
| SEQ ID NO: 206 | Alexa Fluor-633-Ahx-GOPGOPGOPGOPGOPGOPGOPGOPGOP-NH₂ |
| SEQ ID NO: 207 | Alexa Fluor-660-Ahx-GOPGOPGOPGOPGOPGOPGOPGOPGOP-NH₂ |
| SEQ ID NO: 208 | Alexa Fluor-680-Ahx-GOPGOPGOPGOPGOPGOPGOPGOPGOP-NH₂ |
| SEQ ID NO: 209 | Cyanine 3-Ahx-GOPGOPGOPGOPGOPGOPGOPGOPGOP-NH₂ |
| SEQ ID NO: 210 | Cyanine 5-Ahx-GOPGOPGOPGOPGOPGOPGOPGOPGOP-NH₂ |
| SEQ ID NO: 211 | Cyanine 5.5-Ahx-GOPGOPGOPGOPGOPGOPGOPGOPGOP-NH₂ |
| SEQ ID NO: 212 | Cyanine 7-Ahx-GOPGOPGOPGOPGOPGOPGOPGOPGOP-NH₂ |
| SEQ ID NO: 213 | Cyanine 7.5-Ahx-GOPGOPGOPGOPGOPGOPGOPGOPGOP-NH₂ |
| SEQ ID NO: 214 | Cyanine 3-phycoerythrin-Ahx-GOPGOPGOPGOPGOPGOPGOPGOPGOP-NH₂ |
| SEQ ID NO: 215 | Cyanine 5-phycoerythrin-Ahx-GOPGOPGOPGOPGOPGOPGOPGOPGOP-NH₂ |
| SEQ ID NO: 216 | Cyanine 5.5-phycoerythrin-Ahx-GOPGOPGOPGOPGOPGOPGOPGOPGOP-NH₂ |
| SEQ ID NO: 217 | Cyanine 7-phycoerythrin-Ahx-GOPGOPGOPGOPGOPGOPGOPGOPGOP-NH₂ |
| SEQ ID NO: 218 | Cyanine 7.5-phycoerythrin-Ahx-GOPGOPGOPGOPGOPGOPGOPGOPGOP-NH₂ |
| SEQ ID NO: 219 | Rhodamine-Ahx-GOPGOPGOPGOPGOPGOPGOPGOPGOP-NH₂ |
| SEQ ID NO: 220 | Sulfo-Cyanine3-Ahx-GOPGOPGOPGOPGOPGOPGOPGOPGOP-NH₂ |
| SEQ ID NO: 221 | Sulfo-Cyanine5-Ahx-GOPGOPGOPGOPGOPGOPGOPGOPGOP-NH₂ |
| SEQ ID NO: 222 | Sulfo-Cyanine5.5-Ahx-GOPGOPGOPGOPGOPGOPGOPGOPGOP-NH₂ |
| SEQ ID NO: 223 | Sulfo-Cyanine7-Ahx-GOPGOPGOPGOPGOPGOPGOPGOPGOP-NH₂ |
| SEQ ID NO: 224 | Sulfo-Cyanine7.5-Ahx-GOPGOPGOPGOPGOPGOPGOPGOPGOP-NH₂ |
| SEQ ID NO: 225 | Texas Red-Ahx-GOPGOPGOPGOPGOPGOPGOPGOPGOP-NH₂ |
| SEQ ID NO: 226 | Biotin-GGG-GPPGPPGPPGPPGPPGPPGPPGPPGPP-NH₂ |
| SEQ ID NO: 227 | 5(6)-Carboxyfluorescein-GGG-GPPGPPGPPGPPGPPGPPGPPGPPGPP-NH₂ |
| SEQ ID NO: 228 | Alexa Fluor-350-GGG-GPPGPPGPPGPPGPPGPPGPPGPPGPP-NH₂ |
| SEQ ID NO: 229 | Alexa Fluor-430-GGG-GPPGPPGPPGPPGPPGPPGPPGPPGPP-NH₂ |
| SEQ ID NO: 230 | Alexa Fluor-488-GGG-GPPGPPGPPGPPGPPGPPGPPGPPGPP-NH₂ |
| SEQ ID NO: 231 | Alexa Fluor-546-GGG-GPPGPPGPPGPPGPPGPPGPPGPPGPP-NH₂ |
| SEQ ID NO: 232 | Alexa Fluor-568-GGG-GPPGPPGPPGPPGPPGPPGPPGPPGPP-NH₂ |
| SEQ ID NO: 233 | Alexa Fluor-594-GGG-GPPGPPGPPGPPGPPGPPGPPGPPGPP-NH₂ |
| SEQ ID NO: 234 | Alexa Fluor-633-GGG-GPPGPPGPPGPPGPPGPPGPPGPPGPP-NH₂ |
| SEQ ID NO: 235 | Alexa Fluor-660-GGG-GPPGPPGPPGPPGPPGPPGPPGPPGPP-NH₂ |
| SEQ ID NO: 236 | Alexa Fluor-680-GGG-GPPGPPGPPGPPGPPGPPGPPGPPGPP-NH₂ |
| SEQ ID NO: 237 | Cyanine 3-GGG-GPPGPPGPPGPPGPPGPPGPPGPPGPP-NH₂ |
| SEQ ID NO: 238 | Cyanine 5-GGG-GPPGPPGPPGPPGPPGPPGPPGPPGPP-NH₂ |
| SEQ ID NO: 239 | Cyanine 5.5-GGG-GPPGPPGPPGPPGPPGPPGPPGPPGPP-NH₂ |
| SEQ ID NO: 240 | Cyanine 7-GGG-GPPGPPGPPGPPGPPGPPGPPGPPGPP-NH₂ |
| SEQ ID NO: 241 | Cyanine 7.5-GGG-GPPGPPGPPGPPGPPGPPGPPGPPGPP-NH₂ |
| SEQ ID NO: 242 | Cyanine 3-phycoerythrin-GGG-GPPGPPGPPGPPGPPGPPGPPGPPGPP-NH₂ |
| SEQ ID NO: 243 | Cyanine 5-phycoerythrin-GGG-GPPGPPGPPGPPGPPGPPGPPGPPGPP-NH₂ |
| SEQ ID NO: 244 | Cyanine 5.5-phycoerythrin-GGG-GPPGPPGPPGPPGPPGPPGPPGPPGPP-NH₂ |
| SEQ ID NO: 245 | Cyanine 7-phycoerythrin-GGG-GPPGPPGPPGPPGPPGPPGPPGPPGPP-NH₂ |
| SEQ ID NO: 246 | Cyanine 7.5-phycoerythrin-GGG-GPPGPPGPPGPPGPPGPPGPPGPPGPP-NH₂ |
| SEQ ID NO: 247 | Rhodamine-GGG-GPPGPPGPPGPPGPPGPPGPPGPPGPP-NH₂ |
| SEQ ID NO: 248 | Sulfo-Cyanine3-GGG-GPPGPPGPPGPPGPPGPPGPPGPPGPP-NH₂ |
| SEQ ID NO: 249 | Sulfo-Cyanine5-GGG-GPPGPPGPPGPPGPPGPPGPPGPPGPP-NH₂ |
| SEQ ID NO: 250 | Sulfo-Cyanine5.5-GGG-GPPGPPGPPGPPGPPGPPGPPGPPGPP-NH₂ |
| SEQ ID NO: 251 | Sulfo-Cyanine7-GGG-GPPGPPGPPGPPGPPGPPGPPGPPGPP-NH₂ |
| SEQ ID NO: 252 | Sulfo-Cyanine7.5-GGG-GPPGPPGPPGPPGPPGPPGPPGPPGPP-NH₂ |
| SEQ ID NO: 253 | Texas Red-GGG-GPPGPPGPPGPPGPPGPPGPPGPPGPP-NH₂ |
| SEQ ID NO: 254 | Biotin-Ahx-GPPGPPGPPGPPGPPGPPGPPGPPGPP-NH₂ |
| SEQ ID NO: 255 | 5(6)-Carboxyfluorescein-Ahx-GPPGPPGPPGPPGPPGPPGPPGPPGPP-NH₂ |
| SEQ ID NO: 256 | Alexa Fluor-350-Ahx-GPPGPPGPPGPPGPPGPPGPPGPPGPP-NH₂ |
| SEQ ID NO: 257 | Alexa Fluor-430-Ahx-GPPGPPGPPGPPGPPGPPGPPGPPGPP-NH₂ |
| SEQ ID NO: 258 | Alexa Fluor-488-Ahx-GPPGPPGPPGPPGPPGPPGPPGPPGPP-NH₂ |
| SEQ ID NO: 259 | Alexa Fluor-546-Ahx-GPPGPPGPPGPPGPPGPPGPPGPPGPP-NH₂ |
| SEQ ID NO: 260 | Alexa Fluor-568-Ahx-GPPGPPGPPGPPGPPGPPGPPGPPGPP-NH₂ |
| SEQ ID NO: 261 | Alexa Fluor-594-Ahx-GPPGPPGPPGPPGPPGPPGPPGPPGPP-NH₂ |
| SEQ ID NO: 262 | Alexa Fluor-633-Ahx-GPPGPPGPPGPPGPPGPPGPPGPPGPP-NH₂ |
| SEQ ID NO: 263 | Alexa Fluor-660-Ahx-GPPGPPGPPGPPGPPGPPGPPGPPGPP-NH₂ |
| SEQ ID NO: 264 | Alexa Fluor-680-Ahx-GPPGPPGPPGPPGPPGPPGPPGPPGPP-NH₂ |
| SEQ ID NO: 265 | Cyanine 3-Ahx-GPPGPPGPPGPPGPPGPPGPPGPPGPP-NH₂ |
| SEQ ID NO: 266 | Cyanine 5-Ahx-GPPGPPGPPGPPGPPGPPGPPGPPGPP-NH₂ |
| SEQ ID NO: 267 | Cyanine 5.5-Ahx-GPPGPPGPPGPPGPPGPPGPPGPPGPP-NH₂ |
| SEQ ID NO: 268 | Cyanine 7-Ahx-GPPGPPGPPGPPGPPGPPGPPGPPGPP-NH₂ |
| SEQ ID NO: 269 | Cyanine 7.5-Ahx-GPPGPPGPPGPPGPPGPPGPPGPPGPP-NH₂ |
| SEQ ID NO: 270 | Cyanine 3-phycoerythrin-Ahx-GPPGPPGPPGPPGPPGPPGPPGPPGPP-NH₂ |
| SEQ ID NO: 271 | Cyanine 5-phycoerythrin-Ahx-GPPGPPGPPGPPGPPGPPGPPGPPGPP-NH₂ |
| SEQ ID NO: 272 | Cyanine 5.5-phycoerythrin-Ahx-GPPGPPGPPGPPGPPGPPGPPGPPGPP-NH₂ |
| SEQ ID NO: 273 | Cyanine 7-phycoerythrin-Ahx-GPPGPPGPPGPPGPPGPPGPPGPPGPP-NH₂ |
| SEQ ID NO: 274 | Cyanine 7.5-phycoerythrin-Ahx-GPPGPPGPPGPPGPPGPPGPPGPPGPP-NH₂ |
| SEQ ID NO: 275 | Rhodamine-Ahx-GPPGPPGPPGPPGPPGPPGPPGPPGPP-NH₂ |
| SEQ ID NO: 276 | Sulfo-Cyanine3-Ahx-GPPGPPGPPGPPGPPGPPGPPGPPGPP-NH₂ |
| SEQ ID NO: 277 | Sulfo-Cyanine5-Ahx-GPPGPPGPPGPPGPPGPPGPPGPPGPP-NH₂ |
| SEQ ID NO: 278 | Sulfo-Cyanine5.5-Ahx-GPPGPPGPPGPPGPPGPPGPPGPPGPP-NH₂ |
| SEQ ID NO: 279 | Sulfo-Cyanine7-Ahx-GPPGPPGPPGPPGPPGPPGPPGPPGPP-NH₂ |
| SEQ ID NO: 280 | Sulfo-Cyanine7.5-Ahx-GPPGPPGPPGPPGPPGPPGPPGPPGPP-NH₂ |
| SEQ ID NO: 281 | Texas Red-Ahx-GPPGPPGPPGPPGPPGPPGPPGPPGPP-NH₂ |
| SEQ ID NO: 282 | Biotin-GGG-GPFGPFGPFGPFGPFGPFGPFGPFGPF-NH₂ |
| SEQ ID NO: 283 | 5(6)-Carboxyfluorescein-GGG-GPFGPFGPFGPFGPFGPFGPFGPFGPF-NH₂ |
| SEQ ID NO: 284 | Alexa Fluor-350-GGG-GPFGPFGPFGPFGPFGPFGPFGPFGPF-NH₂ |
| SEQ ID NO: 285 | Alexa Fluor-430-GGG-GPFGPFGPFGPFGPFGPFGPFGPFGPF-NH₂ |
| SEQ ID NO: 286 | Alexa Fluor-488-GGG-GPFGPFGPFGPFGPFGPFGPFGPFGPF-NH₂ |
| SEQ ID NO: 287 | Alexa Fluor-546-GGG-GPFGPFGPFGPFGPFGPFGPFGPFGPF-NH₂ |
| SEQ ID NO: 288 | Alexa Fluor-568-GGG-GPFGPFGPFGPFGPFGPFGPFGPFGPF-NH₂ |
| SEQ ID NO: 289 | Alexa Fluor-594-GGG-GPFGPFGPFGPFGPFGPFGPFGPFGPF-NH₂ |
| SEQ ID NO: 290 | Alexa Fluor-633-GGG-GPFGPFGPFGPFGPFGPFGPFGPFGPF-NH₂ |
| SEQ ID NO: 291 | Alexa Fluor-660-GGG-GPFGPFGPFGPFGPFGPFGPFGPFGPF-NH₂ |
| SEQ ID NO: 292 | Alexa Fluor-680-GGG-GPFGPFGPFGPFGPFGPFGPFGPFGPF-NH₂ |
| SEQ ID NO: 293 | Cyanine 3-GGG-GPFGPFGPFGPFGPFGPFGPFGPFGPF-NH₂ |
| SEQ ID NO: 294 | Cyanine 5-GGG-GPFGPFGPFGPFGPFGPFGPFGPFGPF-NH₂ |
| SEQ ID NO: 295 | Cyanine 5.5-GGG-GPFGPFGPFGPFGPFGPFGPFGPFGPF-NH₂ |
| SEQ ID NO: 296 | Cyanine 7-GGG-GPFGPFGPFGPFGPFGPFGPFGPFGPF-NH₂ |
| SEQ ID NO: 297 | Cyanine 7.5-GGG-GPFGPFGPFGPFGPFGPFGPFGPFGPF-NH₂ |
| SEQ ID NO: 298 | Cyanine 3-phycoerythrin-GGG-GPFGPFGPFGPFGPFGPFGPFGPFGPF-NH₂ |
| SEQ ID NO: 299 | Cyanine 5-phycoerythrin-GGG-GPFGPFGPFGPFGPFGPFGPFGPFGPF-NH₂ |
| SEQ ID NO: 300 | Cyanine 5.5-phycoerythrin-GGG-GPFGPFGPFGPFGPFGPFGPFGPFGPF-NH₂ |
| SEQ ID NO: 301 | Cyanine 7-phycoerythrin-GGG-GPFGPFGPFGPFGPFGPFGPFGPFGPF-NH₂ |
| SEQ ID NO: 302 | Cyanine 7.5-phycoerythrin-GGG-GPFGPFGPFGPFGPFGPFGPFGPFGPF-NH₂ |
| SEQ ID NO: 303 | Rhodamine-GGG-GPFGPFGPFGPFGPFGPFGPFGPFGPF-NH₂ |
| SEQ ID NO: 304 | Sulfo-Cyanine3-GGG-GPFGPFGPFGPFGPFGPFGPFGPFGPF-NH₂ |
| SEQ ID NO: 305 | Sulfo-Cyanine5-GGG-GPFGPFGPFGPFGPFGPFGPFGPFGPF-NH₂ |
| SEQ ID NO: 306 | Sulfo-Cyanine5.5-GGG-GPFGPFGPFGPFGPFGPFGPFGPFGPF-NH₂ |
| SEQ ID NO: 307 | Sulfo-Cyanine7-GGG-GPFGPFGPFGPFGPFGPFGPFGPFGPF-NH₂ |
| SEQ ID NO: 308 | Sulfo-Cyanine7.5-GGG-GPFGPFGPFGPFGPFGPFGPFGPFGPF-NH₂ |
| SEQ ID NO: 309 | Texas Red-GGG-GPFGPFGPFGPFGPFGPFGPFGPFGPF-NH₂ |
| SEQ ID NO: 310 | Biotin-Ahx-GPFGPFGPFGPFGPFGPFGPFGPFGPF-NH₂ |
| SEQ ID NO: 311 | 5(6)-Carboxyfluorescein-Ahx-GPFGPFGPFGPFGPFGPFGPFGPFGPF-NH₂ |
| SEQ ID NO: 312 | Alexa Fluor-350-Ahx-GPFGPFGPFGPFGPFGPFGPFGPFGPF-NH₂ |
| SEQ ID NO: 313 | Alexa Fluor-430-Ahx-GPFGPFGPFGPFGPFGPFGPFGPFGPF-NH₂ |
| SEQ ID NO: 314 | Alexa Fluor-488-Ahx-GPFGPFGPFGPFGPFGPFGPFGPFGPF-NH₂ |
| SEQ ID NO: 315 | Alexa Fluor-546-Ahx-GPFGPFGPFGPFGPFGPFGPFGPFGPF-NH₂ |
| SEQ ID NO: 316 | Alexa Fluor-568-Ahx-GPFGPFGPFGPFGPFGPFGPFGPFGPF-NH₂ |
| SEQ ID NO: 317 | Alexa Fluor-594-Ahx-GPFGPFGPFGPFGPFGPFGPFGPFGPF-NH₂ |
| SEQ ID NO: 318 | Alexa Fluor-633-Ahx-GPFGPFGPFGPFGPFGPFGPFGPFGPF-NH₂ |
| SEQ ID NO: 319 | Alexa Fluor-660-Ahx-GPFGPFGPFGPFGPFGPFGPFGPFGPF-NH₂ |
| SEQ ID NO: 320 | Alexa Fluor-680-Ahx-GPFGPFGPFGPFGPFGPFGPFGPFGPF-NH₂ |
| SEQ ID NO: 321 | Cyanine 3-Ahx-GPFGPFGPFGPFGPFGPFGPFGPFGPF-NH₂ |
| SEQ ID NO: 322 | Cyanine 5-Ahx-GPFGPFGPFGPFGPFGPFGPFGPFGPF-NH₂ |
| SEQ ID NO: 323 | Cyanine 5.5-Ahx-GPFGPFGPFGPFGPFGPFGPFGPFGPF-NH₂ |
| SEQ ID NO: 324 | Cyanine 7-Ahx-GPFGPFGPFGPFGPFGPFGPFGPFGPF-NH₂ |
| SEQ ID NO: 325 | Cyanine 7.5-Ahx-GPFGPFGPFGPFGPFGPFGPFGPFGPF-NH₂ |
| SEQ ID NO: 326 | Cyanine 3-phycoerythrin-Ahx-GPFGPFGPFGPFGPFGPFGPFGPFGPF-NH₂ |
| SEQ ID NO: 327 | Cyanine 5-phycoerythrin-Ahx-GPFGPFGPFGPFGPFGPFGPFGPFGPF-NH₂ |
| SEQ ID NO: 328 | Cyanine 5.5-phycoerythrin-Ahx-GPFGPFGPFGPFGPFGPFGPFGPFGPF-NH₂ |
| SEQ ID NO: 329 | Cyanine 7-phycoerythrin-Ahx-GPFGPFGPFGPFGPFGPFGPFGPFGPF-NH₂ |
| SEQ ID NO: 330 | Cyanine 7.5-phycoerythrin-Ahx-GPFGPFGPFGPFGPFGPFGPFGPFGPF-NH₂ |
| SEQ ID NO: 331 | Rhodamine-Ahx-GPFGPFGPFGPFGPFGPFGPFGPFGPF-NH₂ |
| SEQ ID NO: 332 | Sulfo-Cyanine3-Ahx-GPFGPFGPFGPFGPFGPFGPFGPFGPF-NH₂ |
| SEQ ID NO: 333 | Sulfo-Cyanine5-Ahx-GPFGPFGPFGPFGPFGPFGPFGPFGPF-NH₂ |
| SEQ ID NO: 334 | Sulfo-Cyanine5.5-Ahx-GPFGPFGPFGPFGPFGPFGPFGPFGPF-NH₂ |
| SEQ ID NO: 335 | Sulfo-Cyanine7-Ahx-GPFGPFGPFGPFGPFGPFGPFGPFGPF-NH₂ |
| SEQ ID NO: 336 | Sulfo-Cyanine7.5-Ahx-GPFGPFGPFGPFGPFGPFGPFGPFGPF-NH₂ |
| SEQ ID NO: 337 | Texas Red-Ahx-GPFGPFGPFGPFGPFGPFGPFGPFGPF-NH2 |

[0082] In certain sequences provided in Table 1 above, ‘GGG’ represents a Triple Glycine linker. In certain sequences provided in Table 1 above, ‘NH₂’ represents an amidated C-terminus. In certain sequences provided in Table 1 above, the ‘f’ in a ‘GfO’ sequence represents a 2S, 4S-4-fluoroproline (cis conformation). In certain sequences provided in Table 1 above, ‘Ahx’ represents a 6-aminohexanoic acid linker. In certain sequences provided in Table 1 above, the “c” in a ‘GcO’ sequences represents a 2S, 4S-4-chloroproline (cis confirmation). In certain sequences provided in Table 1 above, the ‘F’ in a ‘GPF’ sequence represents a 2S, 4R-4-fluoroproline (trans conformation).

[0083] In some embodiments, a method of the present disclosure can comprise contacting a sample with a CHP having a sequence selected from SEQ ID NO.: 1-337 listed in Table 1 above without containing a GGG or AHX spacer molecule. In some embodiments, the sequence comprises a CHP of Formula 1, L-Sₘ-(Gly-X-Y)₃₋₂₀ (SEQ ID NO: 352), where S is a spacer molecule and m is 0.

[0084] In some embodiments, a method of the present disclosure can comprise contacting a sample with a CHP, wherein the CHP sequence comprises a (Gly-X-Y)₃₋₂₀ (SEQ ID NO: 352) repeating portion, and wherein the repeating portion of the CHP has a sequence selected from SEQ ID NO.: 338-349 (see, e.g., Table 2).

TABLE 2
Sequences for Repeating Portion of Collagen Hybridizing Peptides

| Identifier | Sequence (One-Letter Amino Acid Symbols) |
|---|---|
| SEQ ID NO: 338 | (GPO)₃₋₂₀, where G = glycine, P = proline, O = hydroxyproline |
| SEQ ID NO: 339 | (GfO)₃₋₂₀ where G = glycine, f = cis-fluoroproline (2S,4S-4-fluoroproline), |
| | O = hydroxyproline |
| SEQ ID NO: 340 | (GOP)₃₋₂₀ where G = glycine, P = proline, O = hydroxyproline |
| SEQ ID NO: 341 | (azGPO)₃₋₂₀ where azG = aza-Glycine, P = proline, O = hydroxyproline |
| SEQ ID NO: 342 | (azGfO)₃₋₂₀ where azG = aza-Glycine, f = cis-fluoroproline |
| | (2S,4S-4-fluoroproline), O = Hydroxyproline |
| SEQ ID NO: 343 | (GPF)₃₋₂₀ where G = Glycine, P = Proline, F = trans-fluoroproline |
| | (2S,4R-4-fluoroproline) |
| SEQ ID NO: 344 | (GPP)₃₋₂₀, where G = glycine, P = proline, P = proline |
| SEQ ID NO: 345 | (azGPP)₃₋₂₀, where azG = aza-glycine, P = proline, P = proline |
| SEQ ID NO: 346 | (azGcO)₃₋₂₀, where azG = aza-glycine, c = cis-chloroproline |
| | 2S,4S-4-chloroproline), O = trans-hydroxyproline (2S, 4R-hydroxyproline) |
| SEQ ID NO: 347 | (GcO)₃₋₂₀, where G = glycine, c = cis-chloroproline (2S,4S-4-chloroproline), |
| | O = trans- hydroxyproline (2S, 4R-hydroxyproline) |
| SEQ ID NO: 348 | (azGOP)₃₋₂₀ where azG = aza-Glycine, P = proline, O = hydroxyproline |
| SEQ ID NO: 349 | (azGPF)₃₋₂₀ where azG = aza-Glycine, P = Proline, F = trans-fluoroproline |
| | (2S,4R-4-fluoroproline) |

[0085] Other Embodiments and Equivalents including, but not limited to, a dimeric version of each sequence listed in Tables 1 and 2. In certain embodiments, a dimeric sequence can differ from an amino acid sequence as provided in any of Tables 1 and 2 by 1 amino acid, 2 amino acids, 3 amino acids, 4 amino acids 5 amino acids, 6 amino acids, 7 amino acids, 8 amino acids, 9 amino acids, 10 amino acids or greater than 10 amino acids. In certain embodiments, a dimeric sequence can comprise a glycine offset and/or a lysine branch point.

[0086] In another aspect, the present disclosure relates to a method of determining presence or progression of a condition in a patient, comprising detecting non-triple helical collagen content in a sample from the patient by contacting the labeled CHPs to the non-triple helical collagen. In some embodiments, the condition is one or more selected from the group consisting of progression or resolution in a fibrosis, wound healing, idiopathic pulmonary fibrosis (IPF), aged skin, liver fibrosis, nonalcoholic steatohepatitis (NASH), nonalcoholic fatty liver disease state. (NAFLD), alcoholic fatty liver disease (AFLD), kidney fibrosis, myocardial infarction (MI), age-related macular degeneration (AMD), osteoarthritis (OA), and keratoconus. In some embodiments, the condition is liver fibrosis. In some embodiments, the condition is nonalcoholic steatohepatitis (NASH). In some embodiments, the condition is nonalcoholic fatty liver disease (NAFLD). In some embodiments, the condition is alcoholic fatty liver disease (AFLD). In some embodiments, the method further comprises detecting non-triple helical collagen content in another sample from the patient. In additional embodiments, the method further comprises comparing the detected non-triple helical collagen content in a sample with that in said another sample or with a control content value.

[0087] The section headings used herein are for organizational purposes only and are not to be construed as limiting the subject matter described.

[0088] It is to be understood that the methods described herein are not limited to the particular methodology, protocols, subjects, and sequencing techniques described herein and as such may vary. It is also to be understood that the terminology used herein is for the purpose of describing particular embodiments only, and is not intended to limit the scope of the methods and compositions described herein, which will be limited only by the appended claims. While some embodiments of the present disclosure have been shown and described herein, it will be obvious to those skilled in the art that such embodiments are provided by way of example only. Numerous variations, changes, and substitutions will now occur to those skilled in the art without departing from the disclosure. It should be understood that various alternatives to the embodiments of the disclosure described herein may be employed in practicing the disclosure. It is intended that the following claims define the scope of the disclosure and that methods and structures within the scope of these claims and their equivalents be covered thereby.

[0089] Several aspects are described with reference to example applications for illustration. Unless otherwise indicated, any embodiment may be combined with any other embodiment. It should be understood that numerous specific details, relationships, and methods are set forth to provide a full understanding of the features described herein. A skilled artisan, however, will readily recognize that the features described herein may be practiced without one or more of the specific details or with other methods. The features described herein are not limited by the illustrated ordering of acts or events, as some acts may occur in different orders and/or concurrently with other acts or events. Furthermore, not all illustrated acts or events are required to implement a methodology in accordance with the features described herein. Further, to the extent that the methods of the present disclosure do not rely on the particular order of steps set forth herein, the particular order of the steps should not be construed as limitation on the claims. Any claims directed to the methods of the present disclosure should not be limited to the performance of their steps in the order written, and one skilled in the art may readily appreciate that the steps may be varied and still remain within the spirit and scope of the present disclosure.

[0090] While some embodiments have been shown and described herein, it will be obvious to those skilled in the art that such embodiments are provided by way of example only. It is not intended that embodiments of the present disclosure be limited by the specific examples provided within the specification. While certain embodiments of the present disclosure have been described with reference to the aforementioned specification, the descriptions and illustrations of the embodiments herein are not meant to be construed in a limiting sense. Numerous variations, changes, and substitutions will now occur to those skilled in the art without departing from the disclosure.

[0091] Furthermore, it shall be understood that all aspects of the embodiments of the present disclosure are not limited to the specific depictions, configurations or relative proportions set forth herein which depend upon a variety of conditions and variables. It should be understood that various alternatives to the embodiments of the disclosure described herein may be employed in practicing the invention. It is therefore contemplated that the disclosure shall also cover any such alternatives, modifications, variations or equivalents. It is intended that the following claims define, at least in part, the scope of the invention and that methods and structures within the scope of these claims and their equivalents be covered thereby.

[0092] It will be appreciated by those skilled in the art that changes could be made to the exemplary embodiments shown and described above without departing from the broad inventive concepts thereof. It is understood, therefore, that this disclosure is not limited to the exemplary embodiments shown and described, but it is intended to cover modifications within the spirit and scope of the present disclosure as defined by the claims. For example, specific features of the exemplary embodiments may or may not be part of the claimed invention and various features of the disclosed embodiments may be combined. The words “right”, “left”, “lower” and “upper” designate directions in the drawings to which reference is made. Unless specifically set forth herein, the terms “a”, “an” and “the” are not limited to one element but instead should be read as meaning “at least one”.

[0093] Ranges recited herein are understood to be shorthand for all of the values within the range, inclusive of the recited endpoints. For example, a range of 1 to 50 is understood to include any number, combination of numbers, or sub-range from the group consisting of 1, 2, 3, 4, 5, 6, 7, 8, 9, 10, 11, 12, 13, 14, 15, 16, 17, 18, 19, 20, 21, 22, 23, 24, 25, 26, 27, 28, 29, 30, 31, 32, 33, 34, 35, 36, 37, 38, 39, 40, 41, 42, 43, 44, 45, 46, 47, 48, 49, and 50.

[0094] It is to be understood that at least some of the figures and descriptions of the disclosure have been simplified to focus on elements that are relevant for a clear understanding of the disclosure, while eliminating, for purposes of clarity, other elements that those of ordinary skill in the art will appreciate may also comprise a portion of the disclosure. However, because such elements are well known in the art, and because they do not necessarily facilitate a better understanding of the disclosure, a description of such elements is not provided herein.

### EXAMPLES

### Example 1—Determining the Relative Content of Degraded Collagen in a Tissue using CHPs

[0095] Two neighboring sections of the same diseased mouse heart tissue, one treated with thorough heat denaturation (e.g., 10 min incubation in 90° C. water bath for frozen sections, or two rounds of 5 min heat-mediated antigen retrieval at 95° C.) and the other not treated at all, are stained with the 5-FAM- or biotin-dimeric CHP (diCHP) under the same conditions. The diCHP signal from the fully denatured section represents the total collagen content, whereas the signal in the untreated section comes from the naturally degraded collagen in the disease condition. The ratio between the fluorescence signals detected at the same region of interest within the two slides provides an estimation of what percentage of collagen is degraded in the area.

[0096] The fluorescence signals can be quantified using an ImageJ-based protocol. The contents of degraded collagen for the hearts harvested at the early and late stages post MI (1 week vs. 3 weeks) are compared with normal hearts as negative controls. For each group at each time point, 5 hearts are analyzed; for each heart, 10 frozen sections and 10 paraffin sections are stained to allow statistical analysis. To confirm the accuracy of this assay, the level of the degraded collagen of the MI heart tissues using frozen sections and a trypsin-hydroxyproline assay are quantified. The sections are treated with a trypsin solution which selectively solubilizes the degraded, unfolded collagen; the collagen contents within the trypsin solution and the remaining tissue section are quantified by the standard hydroxyproline assay, and the percentage of the protease-degraded collagen originally present in the tissue can be calculated. Because the trypsin assay only works on unfixed cryosections and only measure the average percentage over the whole section, the results of the trypsin assay are compared to the percentage quantified from the whole section scans of the frozen slides stained with di-CHP.

### Example 2—Determining Total Collagen Content using CHPs as Compared to Other Staining Techniques

[0097] A direct stain comparison study was conducted using PSR, MT, Herovici's stain, and collagen I and collagen III antibodies in order to detect total collagen in a fibrotic mouse liver model to compare them with the biotin labeled CHPs (B-CHPs). All staining and image analysis was performed by HistoTox Labs, a third-party contract research organization, in order to prevent bias in evaluation and ensure all stains were carried out correctly. The severity of fibrosis in each slide was scored by a veterinary pathologist.

[0098] FIGS. 5A-5J show representative photomicrographs of mouse livers stained using five different methods. Serial sections were taken from a healthy (control) mouse liver (FIGS. 5A-5E) and a fibrotic mouse liver 8 weeks after injection with CCl₄ (FIGS. 5F-5J). Collagen, identified by arrows in all photos, is stained blue in MT, pink/red in PSR, pink/red for mature collagen and blue for young collagen in Herovici's, dark to light brown for Col I/III cocktail, and dark brown in CHP staining. Other features of interest are labeled as: C-central vein, H-hepatocytes, P-portal triads. Magnification was 40×, scale bar=200 μM.

[0099] As evident from the photos in FIGS. 5A-5J B-CHP performed just as well, if not better, than all other stains. Comparing the spatial staining pattern of CHP and all other stains, including antibody Col I/III cocktail, CHPs allowed easier visualization of collagen and pathologists were able to easily identify collagen without needing to interpret shades of color. Moreover, B-CHP was the only stain that identified reticulin fibers, indicating CHPs may also be used in place of silver stains for reticular fibers (e.g., Gomori's reticulin stain, Gordon and Sweet's reticulin stain, or Movat Pentachrome stain). The reticulin stain is most useful for identifying changes to the hepatic architecture (loss of hepatocytes, thickening of hepatic cords, changes in lobulation, fibrosis/cirrhosis etc.).

[0100] In addition to standard histology assessment, each of the slides was assessed using automated image analysis to quantify the area of collagen stained in each sample. For all images, regions of interest were generated to include liver tissue, but exclude artifacts (folds, tears, etc.) large blood vessels, and non-liver tissue. Regions of interest were then subjected to several imaging filters to separate positively stained areas from negative areas. The positive area was quantified, then compared to the total area in the region of interest.

[0101] In PSR staining, collagen appears bright red and remaining tissue a pale yellow. These images were easily characterized using automated image analysis without issue due to the high contrast between positive and negative regions. In Masson's Trichrome, collagen appears blue, and cells appear red. However, some endothelial cells exhibited weak blue staining in their cytoplasm and as a result, were intermittently detected by the automated image analysis even after careful thresholding. This likely resulted in an over-detection of collagen during quantification. Herovici-stained sections exhibited pink/red staining for mature collagen and pale blue for young collagen. Hepatocyte cytoplasm was stained a pale pink to pink-purple and mineral regions were stained dark purple to black. Overall, contrast was very-poor for Herovici-stained tissue, and as a result, the image analysis could only be performed for the mature collagen (pink/red) as the young collagen could not be differentiated from the negatively stained region.

[0102] CHP-stained sections exhibited light brown staining of collagen fibers (DAB staining of B-CHP). Negative regions were stained light blue to grey for cytoplasm and dark blue for nuclei (due to hematoxylin counterstain). Image analysis was generally specific to CHP-labeled collagen fibrils, but some areas of elevated background staining required the algorithm to slightly under-detect CHP-stained regions.

[0103] FIG. 6 shows collagen quantification by image analysis. Collagen was detected in all samples, with low overall collagen detected in naive samples, and significantly higher quantities of collagen detected in diseased samples. In naive samples the total collagen was low across all samples and staining methods. However, substantial differences were observed between stains in samples from diseased tissue. The most collagen was detected using Masson's Trichrome. However, as noted above, the weak blue staining of hepatocyte cytoplasm interfered with specific analysis, and the quantity of collagen is likely overrepresented.

[0104] PSR and CHP with HIER were highly similar and likely represent an accurate assessment of total collagen content. Herovici's staining was difficult to accurately assess using image analysis and had the smallest area of detected collagen. In addition, consistent with CHP's specificity for denatured collagen vs all collagen, tissue sections that did not undergo HIER had a lower amount of collagen detected, indicating that both intact and denatured collagen are elevated in the fibrotic tissue. Representative images and analysis from fibrotic samples are shown in FIG. 7.

### Example 3—Detecting Total and Damaged Collagen in Human Liver Biopsies

[0105] Experiments were performed to assess (i) whether CHPs could be used as a reliable label to replace existing histochemical approaches and collagen proportionate area in the assessment of chronic liver injury, and (ii) whether CHPs can they provide additional clinically important information that might predict liver related outcome.

### Methods

[0106] Percutaneous biopsies from 76 well characterized patients with NAFLD were used as was a series of explant tissues including those with bridging necrosis and both inactive and active cirrhosis. Sections were incubated with biotinylated CHPs at room temperature to detect damaged collagen; sections that had been pre-heated at 80° C. were used to analyze total collagen content. The intensity and area of labelling was assessed (i) using a semi quantitative index and (ii) in scanned slides using QuPath; ratios of damaged: total collagen were calculated. Correlations were sought with clinical parameters and with grade and stage of disease (NIH CRN scoring system).

### Results and Discussion

[0107] CHPs provide a reliable tool for the detection of damaged and total collagen in routinely processed human liver biopsies and for the latter may be more consistent than conventional histochemical approaches. In NAFLD, the ratio of damaged to total collagen significantly correlates with CRN stage of disease (stage 1 v stage 4 p<0.00001). Advantageously, the amount of damaged remodeled collagen is significantly lower in those considered to be slow/medium progressors compared with fast progressors (p=0.023), suggesting that these may be of high value in prognostication and in clinical trials.

[0108] FIG. 8 shows representative photographs of B-CHP treated explant tissues obtained from subjects across all stages of NAFLD (with stage 2 and stage 4 NAFLD shown). The modified H-score for the slow/medium progressors was 15.16 (mean), and for fast progressors was 29.29 (mean) with a t-value of −2.3397 and a p-value of 0.023. Thus, CHP staining for remodeling collagen is useful for prognosis of NAFLD progression.

[0109] FIG. 9 shows representative photographs showing total and damaged collagen in B-CHP treated explant tissues obtained from subjects across all stages of NAFLD (with stage 1, stage 2 and stage 4 NAFLD shown). The Total to Damaged Ratios (TDR) determined from the images are as follows: stage 1—17.14 (mean); stage 2—8.3 (mean); and stage 4—11.12 (mean). Comparison of the TDRs between stage 1 and stage 4 (p<0.00001), and between stage 2 and stage 4 (p=0.237) and between stage 3 and stage 4 (not shown) (p=0.0197) indicate that the TDRs provide a statistically significant marker between different stages of the disease. TDR is calculated using HIER mediated CHP staining and non HIER mediated CHP staining.

[0110] Further, exploration of CHP probes in other chronic fibrotic conditions could provide similar diagnostic/prognostic insights.

### Example 4—Determining Total Collagen Content in Formalin-Fixed Paraffin-Embedded (FFPE) Tissue Section using ImageJ/FIJI

### Total Collagen Content

[0111] To use CHPs for evaluating the total collagen content within a FFPE tissue section, the collagen must be fully denatured to allow for CHP binding on all available collagen. After deparaffinization, the tissue sections are heated to thermally denature the collagen. The tests indicate that the long heating periods used in heat induced epitope retrieval (HIER) methods are sufficient to completely denature the collagen in the sample (regardless of the buffer used). The tissue sections shown herein were placed in 50 mL of citrate buffer in a tissue steamer for 45 minutes at 95-100° C. Alternatively, to denature the collagen content in a frozen tissue slide, a water bath can be used to heat up a sealed 50 mL tube containing DI water to temperatures over 85° C. After heating, the hot DI water can be pipetted onto the tissue samples and allowed to sit for 5 minutes (repeat 10×).

### Experimental Protocol

[0112] FFPE Sections: perform deparaffinization prior to CHP staining by submerging sections for 2×5-minute washes in xylenes, 100% ethanol, 95% ethanol, 50% ethanol, and DI water in this order.

[0113] Perform HIER or purposefully heat denature the tissue for the determination of total collagen content.

[0114] Create a solution for CHP staining by dissolving CHP powder in 1×PBS so that the concentration is within a 5-20 μM range. The exact concentration depends on the optimized parameters for the tissue section and the volume needed.

[0115] Heat CHP solution to 80° C. Since CHP can self-assemble into homotrimers in solution over time (e.g., during storage at 4° C.) and lose its driving force for collagen hybridization, the trimeric CHP needs to be thermally dissociated to single strands by heating briefly at 80° C.

[0116] Quickly quench hot CHP solution in an ice water bath (˜30-90 sec) before using it to bind to unfolded collagen in the tissue.

[0117] Apply quenched CHP solution to tissue section. Completely cover tissue section with CHP staining solution and allow overnight binding at 4° C. in a humidity chamber.

[0118] Wash sections using 3×5-minute washes of 1×PBS or 1×Tween-20.

[0119] Mount coverslips and image.

[0120] After washing off excess CHP solution, the tissue can be imaged, and imported into ImageJ/FIJI for fluorescent signal quantification. The signal intensity correlates with the amount of collagen within the sample. As the tissue sections get thicker, they contain more collagen and therefore we expect to see higher signal intensity from CHP binding to denatured collagen strands. As shown in FIG. 4, CHP signal is more intense as the tissue gets thicker, confirming that CHP signal correlates to total collagen content. The intensity was determined by measuring the average pixel intensity of the total area imaged after background subtraction. This method allows researchers to easily visualize and quantify the total collagen content within a tissue section.

### Discussion

[0121] Once the appropriate imaging settings are found, CHP staining allows for easy determination of total collagen content in different tissue samples. This is valuable for examining total collagen content in fibrotic tissues, and it may prove beneficial for evaluating wound healing or disease progression as collagen remodeling is associated with numerous pathological disease and healthy organ upkeep. The fluorescent intensity can be quantified using the ImageJ/FIJI platform.

1. A method of measuring a total collagen content in a sample, comprising
denaturing collagen in the sample by heat or antigen retrieval to produce a denatured sample,
contacting labeled collagen hybridizing peptides (CHPs) to the denatured collagen, and
measuring a signal from the labeled CHPs to determine the total collagen content in the sample.

2. The method according to claim 1, wherein the denaturing comprises heating the sample at a temperature from 60° C. to 160° C.

3. The method according to claim 1, further comprising
contacting labeled collagen hybridizing peptides (CHPs) to the sample without prior to denaturing collagen, and
measuring a signal from the labeled CHPs to determine the total denatured collagen content in the sample.

4. The method according to claim 1, the CHPs are labeled with fluorescent or biotin dyes.

5. The method according to claim 1, wherein the sample is a solution (e.g., homogenizing tissue sample, ECM, etc).

6. The method according to claim 1, wherein the sample is a tissue section (e.g., bone section).

7. The method according to claim 1, wherein the sample is an artificial tissue section.

8. The method according to claim 6, wherein the tissue section has a thickness of at least 1-100 μm.

9. The method according to claim 1, wherein each of the labeled CHPs comprises a sequence represented by Formula I (SEQ ID NO: 352):
L-Sₘ-(Gly-X-Y)₃₋₂₀ (Formula I)
in which L is one or more detectable moieties; S is a spacer molecule and m is an integer from 0 to 10; Gly is glycine; and at least one of X and Y is proline, modified proline, and/or hydroxyproline.

10. The method according to claim 1, wherein each of the CHPs comprises the sequence of any one of SEQ ID NOs: 1-118.

11. The method according to claim 1, wherein the sample is from a patient with liver fibrosis.

12. The method according to claim 1, wherein the method excludes trypsin-hydroxyproline assay.

13. The method according to claim 1, wherein the method excludes picrosirius red with polarized light.

14. The method according to claim 1, wherein the method takes less than three days.

15. The method according to claim 1, wherein the method takes less than two days.

16. A method of determining presence or progression of a condition in a patient, comprising
detecting total collagen content in a sample from the patient by the method according to claim 1,
wherein the condition is one or more selected from the group consisting of fibrosis, wound healing, idiopathic pulmonary fibrosis (IPF), aged skin, liver fibrosis, nonalcoholic steatohepatitis (NASH), nonalcoholic fatty liver disease (NAFLD), alcoholic fatty liver disease (AFLD), kidney fibrosis, myocardial infarction (MI), age-related macular degeneration (AMD), osteoarthritis (OA), and keratoconus.

17. The method according to claim 16, wherein the total collagen content and the damaged collagen content are combined as a ratio for an objective measure of damaged collagen that is normalized to the specific sample group.

18. The method according to claim 17, wherein the ratio is used as predictive biomarker of progression or resolution in a diseased state.

19. The method according to claim 16, wherein the condition is liver fibrosis, nonalcoholic steatohepatitis (NASH), nonalcoholic fatty liver disease (NAFLD) or alcoholic fatty liver disease (AFLD).

20. The method according to claim 16, further comprising detecting total collagen content in another sample from the patient.

21. The method according to claim 16, further comprising detecting non-triple helical collagen in another sample from the patient by contacting the labeled CHPs to the non-triple helical collagen.

22-24. (canceled)

The application's sequence listing, which the Patent Office published only in electronic form, follows.

SEQUENCE LISTING (369 sequences)

SEQ ID NO: 1 - protein, 30 aa, Artificial Sequence
  Description of Artificial Sequence: Synthetic polypeptide
  MOD_RES (6)..(6): Hydroxyproline
  MOD_RES (9)..(9): Hydroxyproline
  MOD_RES (12)..(12): Hydroxyproline
  MOD_RES (15)..(15): Hydroxyproline
  MOD_RES (18)..(18): Hydroxyproline
  MOD_RES (21)..(21): Hydroxyproline
  MOD_RES (24)..(24): Hydroxyproline
  MOD_RES (27)..(27): Hydroxyproline
  MOD_RES (30)..(30): Hydroxyproline
GGGGPPGPPGPPGPPGPPGPPGPPGPPGPP

SEQ ID NO: 2 - protein, 30 aa, Artificial Sequence; identical to SEQ ID NO: 1
  Description of Artificial Sequence: Synthetic polypeptide
  MOD_RES (6)..(6): Hydroxyproline
  MOD_RES (9)..(9): Hydroxyproline
  MOD_RES (12)..(12): Hydroxyproline
  MOD_RES (15)..(15): Hydroxyproline
  MOD_RES (18)..(18): Hydroxyproline
  MOD_RES (21)..(21): Hydroxyproline
  MOD_RES (24)..(24): Hydroxyproline
  MOD_RES (27)..(27): Hydroxyproline
  MOD_RES (30)..(30): Hydroxyproline

SEQ ID NO: 3 - protein, 30 aa, Artificial Sequence; identical to SEQ ID NO: 1
  Description of Artificial Sequence: Synthetic polypeptide
  MOD_RES (6)..(6): Hydroxyproline
  MOD_RES (9)..(9): Hydroxyproline
  MOD_RES (12)..(12): Hydroxyproline
  MOD_RES (15)..(15): Hydroxyproline
  MOD_RES (18)..(18): Hydroxyproline
  MOD_RES (21)..(21): Hydroxyproline
  MOD_RES (24)..(24): Hydroxyproline
  MOD_RES (27)..(27): Hydroxyproline
  MOD_RES (30)..(30): Hydroxyproline

SEQ ID NO: 4 - protein, 30 aa, Artificial Sequence; identical to SEQ ID NO: 1
  Description of Artificial Sequence: Synthetic polypeptide
  MOD_RES (6)..(6): Hydroxyproline
  MOD_RES (9)..(9): Hydroxyproline
  MOD_RES (12)..(12): Hydroxyproline
  MOD_RES (15)..(15): Hydroxyproline
  MOD_RES (18)..(18): Hydroxyproline
  MOD_RES (21)..(21): Hydroxyproline
  MOD_RES (24)..(24): Hydroxyproline
  MOD_RES (27)..(27): Hydroxyproline
  MOD_RES (30)..(30): Hydroxyproline

SEQ ID NO: 5 - protein, 30 aa, Artificial Sequence; identical to SEQ ID NO: 1
  Description of Artificial Sequence: Synthetic polypeptide
  MOD_RES (6)..(6): Hydroxyproline
  MOD_RES (9)..(9): Hydroxyproline
  MOD_RES (12)..(12): Hydroxyproline
  MOD_RES (15)..(15): Hydroxyproline
  MOD_RES (18)..(18): Hydroxyproline
  MOD_RES (21)..(21): Hydroxyproline
  MOD_RES (24)..(24): Hydroxyproline
  MOD_RES (27)..(27): Hydroxyproline
  MOD_RES (30)..(30): Hydroxyproline

SEQ ID NO: 6 - protein, 30 aa, Artificial Sequence; identical to SEQ ID NO: 1
  Description of Artificial Sequence: Synthetic polypeptide
  MOD_RES (6)..(6): Hydroxyproline
  MOD_RES (9)..(9): Hydroxyproline
  MOD_RES (12)..(12): Hydroxyproline
  MOD_RES (15)..(15): Hydroxyproline
  MOD_RES (18)..(18): Hydroxyproline
  MOD_RES (21)..(21): Hydroxyproline
  MOD_RES (24)..(24): Hydroxyproline
  MOD_RES (27)..(27): Hydroxyproline
  MOD_RES (30)..(30): Hydroxyproline

SEQ ID NO: 7 - protein, 30 aa, Artificial Sequence; identical to SEQ ID NO: 1
  Description of Artificial Sequence: Synthetic polypeptide
  MOD_RES (6)..(6): Hydroxyproline
  MOD_RES (9)..(9): Hydroxyproline
  MOD_RES (12)..(12): Hydroxyproline
  MOD_RES (15)..(15): Hydroxyproline
  MOD_RES (18)..(18): Hydroxyproline
  MOD_RES (21)..(21): Hydroxyproline
  MOD_RES (24)..(24): Hydroxyproline
  MOD_RES (27)..(27): Hydroxyproline
  MOD_RES (30)..(30): Hydroxyproline

SEQ ID NO: 8 - protein, 30 aa, Artificial Sequence; identical to SEQ ID NO: 1
  Description of Artificial Sequence: Synthetic polypeptide
  MOD_RES (6)..(6): Hydroxyproline
  MOD_RES (9)..(9): Hydroxyproline
  MOD_RES (12)..(12): Hydroxyproline
  MOD_RES (15)..(15): Hydroxyproline
  MOD_RES (18)..(18): Hydroxyproline
  MOD_RES (21)..(21): Hydroxyproline
  MOD_RES (24)..(24): Hydroxyproline
  MOD_RES (27)..(27): Hydroxyproline
  MOD_RES (30)..(30): Hydroxyproline

SEQ ID NO: 9 - protein, 30 aa, Artificial Sequence; identical to SEQ ID NO: 1
  Description of Artificial Sequence: Synthetic polypeptide
  MOD_RES (6)..(6): Hydroxyproline
  MOD_RES (9)..(9): Hydroxyproline
  MOD_RES (12)..(12): Hydroxyproline
  MOD_RES (15)..(15): Hydroxyproline
  MOD_RES (18)..(18): Hydroxyproline
  MOD_RES (21)..(21): Hydroxyproline
  MOD_RES (24)..(24): Hydroxyproline
  MOD_RES (27)..(27): Hydroxyproline
  MOD_RES (30)..(30): Hydroxyproline

SEQ ID NO: 10 - protein, 30 aa, Artificial Sequence; identical to SEQ ID NO: 1
  Description of Artificial Sequence: Synthetic polypeptide
  MOD_RES (6)..(6): Hydroxyproline
  MOD_RES (9)..(9): Hydroxyproline
  MOD_RES (12)..(12): Hydroxyproline
  MOD_RES (15)..(15): Hydroxyproline
  MOD_RES (18)..(18): Hydroxyproline
  MOD_RES (21)..(21): Hydroxyproline
  MOD_RES (24)..(24): Hydroxyproline
  MOD_RES (27)..(27): Hydroxyproline
  MOD_RES (30)..(30): Hydroxyproline

SEQ ID NO: 11 - protein, 30 aa, Artificial Sequence; identical to SEQ ID NO: 1
  Description of Artificial Sequence: Synthetic polypeptide
  MOD_RES (6)..(6): Hydroxyproline
  MOD_RES (9)..(9): Hydroxyproline
  MOD_RES (12)..(12): Hydroxyproline
  MOD_RES (15)..(15): Hydroxyproline
  MOD_RES (18)..(18): Hydroxyproline
  MOD_RES (21)..(21): Hydroxyproline
  MOD_RES (24)..(24): Hydroxyproline
  MOD_RES (27)..(27): Hydroxyproline
  MOD_RES (30)..(30): Hydroxyproline

SEQ ID NO: 12 - protein, 30 aa, Artificial Sequence; identical to SEQ ID NO: 1
  Description of Artificial Sequence: Synthetic polypeptide
  MOD_RES (6)..(6): Hydroxyproline
  MOD_RES (9)..(9): Hydroxyproline
  MOD_RES (12)..(12): Hydroxyproline
  MOD_RES (15)..(15): Hydroxyproline
  MOD_RES (18)..(18): Hydroxyproline
  MOD_RES (21)..(21): Hydroxyproline
  MOD_RES (24)..(24): Hydroxyproline
  MOD_RES (27)..(27): Hydroxyproline
  MOD_RES (30)..(30): Hydroxyproline

SEQ ID NO: 13 - protein, 30 aa, Artificial Sequence; identical to SEQ ID NO: 1
  Description of Artificial Sequence: Synthetic polypeptide
  MOD_RES (6)..(6): Hydroxyproline
  MOD_RES (9)..(9): Hydroxyproline
  MOD_RES (12)..(12): Hydroxyproline
  MOD_RES (15)..(15): Hydroxyproline
  MOD_RES (18)..(18): Hydroxyproline
  MOD_RES (21)..(21): Hydroxyproline
  MOD_RES (24)..(24): Hydroxyproline
  MOD_RES (27)..(27): Hydroxyproline
  MOD_RES (30)..(30): Hydroxyproline

SEQ ID NO: 14 - protein, 30 aa, Artificial Sequence; identical to SEQ ID NO: 1
  Description of Artificial Sequence: Synthetic polypeptide
  MOD_RES (6)..(6): Hydroxyproline
  MOD_RES (9)..(9): Hydroxyproline
  MOD_RES (12)..(12): Hydroxyproline
  MOD_RES (15)..(15): Hydroxyproline
  MOD_RES (18)..(18): Hydroxyproline
  MOD_RES (21)..(21): Hydroxyproline
  MOD_RES (24)..(24): Hydroxyproline
  MOD_RES (27)..(27): Hydroxyproline
  MOD_RES (30)..(30): Hydroxyproline

SEQ ID NO: 15 - protein, 30 aa, Artificial Sequence; identical to SEQ ID NO: 1
  Description of Artificial Sequence: Synthetic polypeptide
  MOD_RES (6)..(6): Hydroxyproline
  MOD_RES (9)..(9): Hydroxyproline
  MOD_RES (12)..(12): Hydroxyproline
  MOD_RES (15)..(15): Hydroxyproline
  MOD_RES (18)..(18): Hydroxyproline
  MOD_RES (21)..(21): Hydroxyproline
  MOD_RES (24)..(24): Hydroxyproline
  MOD_RES (27)..(27): Hydroxyproline
  MOD_RES (30)..(30): Hydroxyproline

SEQ ID NO: 16 - protein, 30 aa, Artificial Sequence; identical to SEQ ID NO: 1
  Description of Artificial Sequence: Synthetic polypeptide
  MOD_RES (6)..(6): Hydroxyproline
  MOD_RES (9)..(9): Hydroxyproline
  MOD_RES (12)..(12): Hydroxyproline
  MOD_RES (15)..(15): Hydroxyproline
  MOD_RES (18)..(18): Hydroxyproline
  MOD_RES (21)..(21): Hydroxyproline
  MOD_RES (24)..(24): Hydroxyproline
  MOD_RES (27)..(27): Hydroxyproline
  MOD_RES (30)..(30): Hydroxyproline

SEQ ID NO: 17 - protein, 30 aa, Artificial Sequence; identical to SEQ ID NO: 1
  Description of Artificial Sequence: Synthetic polypeptide
  MOD_RES (6)..(6): Hydroxyproline
  MOD_RES (9)..(9): Hydroxyproline
  MOD_RES (12)..(12): Hydroxyproline
  MOD_RES (15)..(15): Hydroxyproline
  MOD_RES (18)..(18): Hydroxyproline
  MOD_RES (21)..(21): Hydroxyproline
  MOD_RES (24)..(24): Hydroxyproline
  MOD_RES (27)..(27): Hydroxyproline
  MOD_RES (30)..(30): Hydroxyproline

SEQ ID NO: 18 - protein, 30 aa, Artificial Sequence; identical to SEQ ID NO: 1
  Description of Artificial Sequence: Synthetic polypeptide
  MOD_RES (6)..(6): Hydroxyproline
  MOD_RES (9)..(9): Hydroxyproline
  MOD_RES (12)..(12): Hydroxyproline
  MOD_RES (15)..(15): Hydroxyproline
  MOD_RES (18)..(18): Hydroxyproline
  MOD_RES (21)..(21): Hydroxyproline
  MOD_RES (24)..(24): Hydroxyproline
  MOD_RES (27)..(27): Hydroxyproline
  MOD_RES (30)..(30): Hydroxyproline

SEQ ID NO: 19 - protein, 30 aa, Artificial Sequence; identical to SEQ ID NO: 1
  Description of Artificial Sequence: Synthetic polypeptide
  MOD_RES (6)..(6): Hydroxyproline
  MOD_RES (9)..(9): Hydroxyproline
  MOD_RES (12)..(12): Hydroxyproline
  MOD_RES (15)..(15): Hydroxyproline
  MOD_RES (18)..(18): Hydroxyproline
  MOD_RES (21)..(21): Hydroxyproline
  MOD_RES (24)..(24): Hydroxyproline
  MOD_RES (27)..(27): Hydroxyproline
  MOD_RES (30)..(30): Hydroxyproline

SEQ ID NO: 20 - protein, 30 aa, Artificial Sequence; identical to SEQ ID NO: 1
  Description of Artificial Sequence: Synthetic polypeptide
  MOD_RES (6)..(6): Hydroxyproline
  MOD_RES (9)..(9): Hydroxyproline
  MOD_RES (12)..(12): Hydroxyproline
  MOD_RES (15)..(15): Hydroxyproline
  MOD_RES (18)..(18): Hydroxyproline
  MOD_RES (21)..(21): Hydroxyproline
  MOD_RES (24)..(24): Hydroxyproline
  MOD_RES (27)..(27): Hydroxyproline
  MOD_RES (30)..(30): Hydroxyproline

SEQ ID NO: 21 - protein, 30 aa, Artificial Sequence; identical to SEQ ID NO: 1
  Description of Artificial Sequence: Synthetic polypeptide
  MOD_RES (6)..(6): Hydroxyproline
  MOD_RES (9)..(9): Hydroxyproline
  MOD_RES (12)..(12): Hydroxyproline
  MOD_RES (15)..(15): Hydroxyproline
  MOD_RES (18)..(18): Hydroxyproline
  MOD_RES (21)..(21): Hydroxyproline
  MOD_RES (24)..(24): Hydroxyproline
  MOD_RES (27)..(27): Hydroxyproline
  MOD_RES (30)..(30): Hydroxyproline

SEQ ID NO: 22 - protein, 30 aa, Artificial Sequence; identical to SEQ ID NO: 1
  Description of Artificial Sequence: Synthetic polypeptide
  MOD_RES (6)..(6): Hydroxyproline
  MOD_RES (9)..(9): Hydroxyproline
  MOD_RES (12)..(12): Hydroxyproline
  MOD_RES (15)..(15): Hydroxyproline
  MOD_RES (18)..(18): Hydroxyproline
  MOD_RES (21)..(21): Hydroxyproline
  MOD_RES (24)..(24): Hydroxyproline
  MOD_RES (27)..(27): Hydroxyproline
  MOD_RES (30)..(30): Hydroxyproline

SEQ ID NO: 23 - protein, 30 aa, Artificial Sequence; identical to SEQ ID NO: 1
  Description of Artificial Sequence: Synthetic polypeptide
  MOD_RES (6)..(6): Hydroxyproline
  MOD_RES (9)..(9): Hydroxyproline
  MOD_RES (12)..(12): Hydroxyproline
  MOD_RES (15)..(15): Hydroxyproline
  MOD_RES (18)..(18): Hydroxyproline
  MOD_RES (21)..(21): Hydroxyproline
  MOD_RES (24)..(24): Hydroxyproline
  MOD_RES (27)..(27): Hydroxyproline
  MOD_RES (30)..(30): Hydroxyproline

SEQ ID NO: 24 - protein, 30 aa, Artificial Sequence; identical to SEQ ID NO: 1
  Description of Artificial Sequence: Synthetic polypeptide
  MOD_RES (6)..(6): Hydroxyproline
  MOD_RES (9)..(9): Hydroxyproline
  MOD_RES (12)..(12): Hydroxyproline
  MOD_RES (15)..(15): Hydroxyproline
  MOD_RES (18)..(18): Hydroxyproline
  MOD_RES (21)..(21): Hydroxyproline
  MOD_RES (24)..(24): Hydroxyproline
  MOD_RES (27)..(27): Hydroxyproline
  MOD_RES (30)..(30): Hydroxyproline

SEQ ID NO: 25 - protein, 30 aa, Artificial Sequence; identical to SEQ ID NO: 1
  Description of Artificial Sequence: Synthetic polypeptide
  MOD_RES (6)..(6): Hydroxyproline
  MOD_RES (9)..(9): Hydroxyproline
  MOD_RES (12)..(12): Hydroxyproline
  MOD_RES (15)..(15): Hydroxyproline
  MOD_RES (18)..(18): Hydroxyproline
  MOD_RES (21)..(21): Hydroxyproline
  MOD_RES (24)..(24): Hydroxyproline
  MOD_RES (27)..(27): Hydroxyproline
  MOD_RES (30)..(30): Hydroxyproline

SEQ ID NO: 26 - protein, 30 aa, Artificial Sequence; identical to SEQ ID NO: 1
  Description of Artificial Sequence: Synthetic polypeptide
  MOD_RES (6)..(6): Hydroxyproline
  MOD_RES (9)..(9): Hydroxyproline
  MOD_RES (12)..(12): Hydroxyproline
  MOD_RES (15)..(15): Hydroxyproline
  MOD_RES (18)..(18): Hydroxyproline
  MOD_RES (21)..(21): Hydroxyproline
  MOD_RES (24)..(24): Hydroxyproline
  MOD_RES (27)..(27): Hydroxyproline
  MOD_RES (30)..(30): Hydroxyproline

SEQ ID NO: 27 - protein, 30 aa, Artificial Sequence; identical to SEQ ID NO: 1
  Description of Artificial Sequence: Synthetic polypeptide
  MOD_RES (6)..(6): Hydroxyproline
  MOD_RES (9)..(9): Hydroxyproline
  MOD_RES (12)..(12): Hydroxyproline
  MOD_RES (15)..(15): Hydroxyproline
  MOD_RES (18)..(18): Hydroxyproline
  MOD_RES (21)..(21): Hydroxyproline
  MOD_RES (24)..(24): Hydroxyproline
  MOD_RES (27)..(27): Hydroxyproline
  MOD_RES (30)..(30): Hydroxyproline

SEQ ID NO: 28 - protein, 30 aa, Artificial Sequence; identical to SEQ ID NO: 1
  Description of Artificial Sequence: Synthetic polypeptide
  MOD_RES (6)..(6): Hydroxyproline
  MOD_RES (9)..(9): Hydroxyproline
  MOD_RES (12)..(12): Hydroxyproline
  MOD_RES (15)..(15): Hydroxyproline
  MOD_RES (18)..(18): Hydroxyproline
  MOD_RES (21)..(21): Hydroxyproline
  MOD_RES (24)..(24): Hydroxyproline
  MOD_RES (27)..(27): Hydroxyproline
  MOD_RES (30)..(30): Hydroxyproline

SEQ ID NO: 29 - protein, 30 aa, Artificial Sequence; identical to SEQ ID NO: 1
  Description of Artificial Sequence: Synthetic polypeptide
  MOD_RES (5)..(5): 2S, 4S-4-fluoroproline
  MOD_RES (6)..(6): Hydroxyproline
  MOD_RES (8)..(8): 2S, 4S-4-fluoroproline
  MOD_RES (9)..(9): Hydroxyproline
  MOD_RES (11)..(11): 2S, 4S-4-fluoroproline
  MOD_RES (12)..(12): Hydroxyproline
  MOD_RES (14)..(14): 2S, 4S-4-fluoroproline
  MOD_RES (15)..(15): Hydroxyproline
  MOD_RES (17)..(17): 2S, 4S-4-fluoroproline
  MOD_RES (18)..(18): Hydroxyproline
  MOD_RES (20)..(20): 2S, 4S-4-fluoroproline
  MOD_RES (21)..(21): Hydroxyproline
  MOD_RES (23)..(23): 2S, 4S-4-fluoroproline
  MOD_RES (24)..(24): Hydroxyproline
  MOD_RES (26)..(26): 2S, 4S-4-fluoroproline
  MOD_RES (27)..(27): Hydroxyproline
  MOD_RES (29)..(29): 2S, 4S-4-fluoroproline
  MOD_RES (30)..(30): Hydroxyproline

SEQ ID NO: 30 - protein, 30 aa, Artificial Sequence; identical to SEQ ID NO: 1
  Description of Artificial Sequence: Synthetic polypeptide
  MOD_RES (5)..(5): 2S, 4S-4-fluoroproline
  MOD_RES (6)..(6): Hydroxyproline
  MOD_RES (8)..(8): 2S, 4S-4-fluoroproline
  MOD_RES (9)..(9): Hydroxyproline
  MOD_RES (11)..(11): 2S, 4S-4-fluoroproline
  MOD_RES (12)..(12): Hydroxyproline
  MOD_RES (14)..(14): 2S, 4S-4-fluoroproline
  MOD_RES (15)..(15): Hydroxyproline
  MOD_RES (17)..(17): 2S, 4S-4-fluoroproline
  MOD_RES (18)..(18): Hydroxyproline
  MOD_RES (20)..(20): 2S, 4S-4-fluoroproline
  MOD_RES (21)..(21): Hydroxyproline
  MOD_RES (23)..(23): 2S, 4S-4-fluoroproline
  MOD_RES (24)..(24): Hydroxyproline
  MOD_RES (26)..(26): 2S, 4S-4-fluoroproline
  MOD_RES (27)..(27): Hydroxyproline
  MOD_RES (29)..(29): 2S, 4S-4-fluoroproline
  MOD_RES (30)..(30): Hydroxyproline

SEQ ID NO: 31 - protein, 30 aa, Artificial Sequence; identical to SEQ ID NO: 1
  Description of Artificial Sequence: Synthetic polypeptide
  MOD_RES (5)..(5): 2S, 4S-4-fluoroproline
  MOD_RES (6)..(6): Hydroxyproline
  MOD_RES (8)..(8): 2S, 4S-4-fluoroproline
  MOD_RES (9)..(9): Hydroxyproline
  MOD_RES (11)..(11): 2S, 4S-4-fluoroproline
  MOD_RES (12)..(12): Hydroxyproline
  MOD_RES (14)..(14): 2S, 4S-4-fluoroproline
  MOD_RES (15)..(15): Hydroxyproline
  MOD_RES (17)..(17): 2S, 4S-4-fluoroproline
  MOD_RES (18)..(18): Hydroxyproline
  MOD_RES (20)..(20): 2S, 4S-4-fluoroproline
  MOD_RES (21)..(21): Hydroxyproline
  MOD_RES (23)..(23): 2S, 4S-4-fluoroproline
  MOD_RES (24)..(24): Hydroxyproline
  MOD_RES (26)..(26): 2S, 4S-4-fluoroproline
  MOD_RES (27)..(27): Hydroxyproline
  MOD_RES (29)..(29): 2S, 4S-4-fluoroproline
  MOD_RES (30)..(30): Hydroxyproline

SEQ ID NO: 32 - protein, 30 aa, Artificial Sequence; identical to SEQ ID NO: 1
  Description of Artificial Sequence: Synthetic polypeptide
  MOD_RES (5)..(5): 2S, 4S-4-fluoroproline
  MOD_RES (6)..(6): Hydroxyproline
  MOD_RES (8)..(8): 2S, 4S-4-fluoroproline
  MOD_RES (9)..(9): Hydroxyproline
  MOD_RES (11)..(11): 2S, 4S-4-fluoroproline
  MOD_RES (12)..(12): Hydroxyproline
  MOD_RES (14)..(14): 2S, 4S-4-fluoroproline
  MOD_RES (15)..(15): Hydroxyproline
  MOD_RES (17)..(17): 2S, 4S-4-fluoroproline
  MOD_RES (18)..(18): Hydroxyproline
  MOD_RES (20)..(20): 2S, 4S-4-fluoroproline
  MOD_RES (21)..(21): Hydroxyproline
  MOD_RES (23)..(23): 2S, 4S-4-fluoroproline
  MOD_RES (24)..(24): Hydroxyproline
  MOD_RES (26)..(26): 2S, 4S-4-fluoroproline
  MOD_RES (27)..(27): Hydroxyproline
  MOD_RES (29)..(29): 2S, 4S-4-fluoroproline
  MOD_RES (30)..(30): Hydroxyproline

SEQ ID NO: 33 - protein, 30 aa, Artificial Sequence; identical to SEQ ID NO: 1
  Description of Artificial Sequence: Synthetic polypeptide
  MOD_RES (5)..(5): 2S, 4S-4-fluoroproline
  MOD_RES (6)..(6): Hydroxyproline
  MOD_RES (8)..(8): 2S, 4S-4-fluoroproline
  MOD_RES (9)..(9): Hydroxyproline
  MOD_RES (11)..(11): 2S, 4S-4-fluoroproline
  MOD_RES (12)..(12): Hydroxyproline
  MOD_RES (14)..(14): 2S, 4S-4-fluoroproline
  MOD_RES (15)..(15): Hydroxyproline
  MOD_RES (17)..(17): 2S, 4S-4-fluoroproline
  MOD_RES (18)..(18): Hydroxyproline
  MOD_RES (20)..(20): 2S, 4S-4-fluoroproline
  MOD_RES (21)..(21): Hydroxyproline
  MOD_RES (23)..(23): 2S, 4S-4-fluoroproline
  MOD_RES (24)..(24): Hydroxyproline
  MOD_RES (26)..(26): 2S, 4S-4-fluoroproline
  MOD_RES (27)..(27): Hydroxyproline
  MOD_RES (29)..(29): 2S, 4S-4-fluoroproline
  MOD_RES (30)..(30): Hydroxyproline

SEQ ID NO: 34 - protein, 30 aa, Artificial Sequence; identical to SEQ ID NO: 1
  Description of Artificial Sequence: Synthetic polypeptide
  MOD_RES (5)..(5): 2S, 4S-4-fluoroproline
  MOD_RES (6)..(6): Hydroxyproline
  MOD_RES (8)..(8): 2S, 4S-4-fluoroproline
  MOD_RES (9)..(9): Hydroxyproline
  MOD_RES (11)..(11): 2S, 4S-4-fluoroproline
  MOD_RES (12)..(12): Hydroxyproline
  MOD_RES (14)..(14): 2S, 4S-4-fluoroproline
  MOD_RES (15)..(15): Hydroxyproline
  MOD_RES (17)..(17): 2S, 4S-4-fluoroproline
  MOD_RES (18)..(18): Hydroxyproline
  MOD_RES (20)..(20): 2S, 4S-4-fluoroproline
  MOD_RES (21)..(21): Hydroxyproline
  MOD_RES (23)..(23): 2S, 4S-4-fluoroproline
  MOD_RES (24)..(24): Hydroxyproline
  MOD_RES (26)..(26): 2S, 4S-4-fluoroproline
  MOD_RES (27)..(27): Hydroxyproline
  MOD_RES (29)..(29): 2S, 4S-4-fluoroproline
  MOD_RES (30)..(30): Hydroxyproline

SEQ ID NO: 35 - protein, 30 aa, Artificial Sequence; identical to SEQ ID NO: 1
  Description of Artificial Sequence: Synthetic polypeptide
  MOD_RES (5)..(5): 2S, 4S-4-fluoroproline
  MOD_RES (6)..(6): Hydroxyproline
  MOD_RES (8)..(8): 2S, 4S-4-fluoroproline
  MOD_RES (9)..(9): Hydroxyproline
  MOD_RES (11)..(11): 2S, 4S-4-fluoroproline
  MOD_RES (12)..(12): Hydroxyproline
  MOD_RES (14)..(14): 2S, 4S-4-fluoroproline
  MOD_RES (15)..(15): Hydroxyproline
  MOD_RES (17)..(17): 2S, 4S-4-fluoroproline
  MOD_RES (18)..(18): Hydroxyproline
  MOD_RES (20)..(20): 2S, 4S-4-fluoroproline
  MOD_RES (21)..(21): Hydroxyproline
  MOD_RES (23)..(23): 2S, 4S-4-fluoroproline
  MOD_RES (24)..(24): Hydroxyproline
  MOD_RES (26)..(26): 2S, 4S-4-fluoroproline
  MOD_RES (27)..(27): Hydroxyproline
  MOD_RES (29)..(29): 2S, 4S-4-fluoroproline
  MOD_RES (30)..(30): Hydroxyproline

SEQ ID NO: 36 - protein, 30 aa, Artificial Sequence; identical to SEQ ID NO: 1
  Description of Artificial Sequence: Synthetic polypeptide
  MOD_RES (5)..(5): 2S, 4S-4-fluoroproline
  MOD_RES (6)..(6): Hydroxyproline
  MOD_RES (8)..(8): 2S, 4S-4-fluoroproline
  MOD_RES (9)..(9): Hydroxyproline
  MOD_RES (11)..(11): 2S, 4S-4-fluoroproline
  MOD_RES (12)..(12): Hydroxyproline
  MOD_RES (14)..(14): 2S, 4S-4-fluoroproline
  MOD_RES (15)..(15): Hydroxyproline
  MOD_RES (17)..(17): 2S, 4S-4-fluoroproline
  MOD_RES (18)..(18): Hydroxyproline
  MOD_RES (20)..(20): 2S, 4S-4-fluoroproline
  MOD_RES (21)..(21): Hydroxyproline
  MOD_RES (23)..(23): 2S, 4S-4-fluoroproline
  MOD_RES (24)..(24): Hydroxyproline
  MOD_RES (26)..(26): 2S, 4S-4-fluoroproline
  MOD_RES (27)..(27): Hydroxyproline
  MOD_RES (29)..(29): 2S, 4S-4-fluoroproline
  MOD_RES (30)..(30): Hydroxyproline

SEQ ID NO: 37 - protein, 30 aa, Artificial Sequence; identical to SEQ ID NO: 1
  Description of Artificial Sequence: Synthetic polypeptide
  MOD_RES (5)..(5): 2S, 4S-4-fluoroproline
  MOD_RES (6)..(6): Hydroxyproline
  MOD_RES (8)..(8): 2S, 4S-4-fluoroproline
  MOD_RES (9)..(9): Hydroxyproline
  MOD_RES (11)..(11): 2S, 4S-4-fluoroproline
  MOD_RES (12)..(12): Hydroxyproline
  MOD_RES (14)..(14): 2S, 4S-4-fluoroproline
  MOD_RES (15)..(15): Hydroxyproline
  MOD_RES (17)..(17): 2S, 4S-4-fluoroproline
  MOD_RES (18)..(18): Hydroxyproline
  MOD_RES (20)..(20): 2S, 4S-4-fluoroproline
  MOD_RES (21)..(21): Hydroxyproline
  MOD_RES (23)..(23): 2S, 4S-4-fluoroproline
  MOD_RES (24)..(24): Hydroxyproline
  MOD_RES (26)..(26): 2S, 4S-4-fluoroproline
  MOD_RES (27)..(27): Hydroxyproline
  MOD_RES (29)..(29): 2S, 4S-4-fluoroproline
  MOD_RES (30)..(30): Hydroxyproline

SEQ ID NO: 38 - protein, 30 aa, Artificial Sequence; identical to SEQ ID NO: 1
  Description of Artificial Sequence: Synthetic polypeptide
  MOD_RES (5)..(5): 2S, 4S-4-fluoroproline
  MOD_RES (6)..(6): Hydroxyproline
  MOD_RES (8)..(8): 2S, 4S-4-fluoroproline
  MOD_RES (9)..(9): Hydroxyproline
  MOD_RES (11)..(11): 2S, 4S-4-fluoroproline
  MOD_RES (12)..(12): Hydroxyproline
  MOD_RES (14)..(14): 2S, 4S-4-fluoroproline
  MOD_RES (15)..(15): Hydroxyproline
  MOD_RES (17)..(17): 2S, 4S-4-fluoroproline
  MOD_RES (18)..(18): Hydroxyproline
  MOD_RES (20)..(20): 2S, 4S-4-fluoroproline
  MOD_RES (21)..(21): Hydroxyproline
  MOD_RES (23)..(23): 2S, 4S-4-fluoroproline
  MOD_RES (24)..(24): Hydroxyproline
  MOD_RES (26)..(26): 2S, 4S-4-fluoroproline
  MOD_RES (27)..(27): Hydroxyproline
  MOD_RES (29)..(29): 2S, 4S-4-fluoroproline
  MOD_RES (30)..(30): Hydroxyproline

SEQ ID NO: 39 - protein, 30 aa, Artificial Sequence; identical to SEQ ID NO: 1
  Description of Artificial Sequence: Synthetic polypeptide
  MOD_RES (5)..(5): 2S, 4S-4-fluoroproline
  MOD_RES (6)..(6): Hydroxyproline
  MOD_RES (8)..(8): 2S, 4S-4-fluoroproline
  MOD_RES (9)..(9): Hydroxyproline
  MOD_RES (11)..(11): 2S, 4S-4-fluoroproline
  MOD_RES (12)..(12): Hydroxyproline
  MOD_RES (14)..(14): 2S, 4S-4-fluoroproline
  MOD_RES (15)..(15): Hydroxyproline
  MOD_RES (17)..(17): 2S, 4S-4-fluoroproline
  MOD_RES (18)..(18): Hydroxyproline
  MOD_RES (20)..(20): 2S, 4S-4-fluoroproline
  MOD_RES (21)..(21): Hydroxyproline
  MOD_RES (23)..(23): 2S, 4S-4-fluoroproline
  MOD_RES (24)..(24): Hydroxyproline
  MOD_RES (26)..(26): 2S, 4S-4-fluoroproline
  MOD_RES (27)..(27): Hydroxyproline
  MOD_RES (29)..(29): 2S, 4S-4-fluoroproline
  MOD_RES (30)..(30): Hydroxyproline

SEQ ID NO: 40 - protein, 30 aa, Artificial Sequence; identical to SEQ ID NO: 1
  Description of Artificial Sequence: Synthetic polypeptide
  MOD_RES (5)..(5): 2S, 4S-4-fluoroproline
  MOD_RES (6)..(6): Hydroxyproline
  MOD_RES (8)..(8): 2S, 4S-4-fluoroproline
  MOD_RES (9)..(9): Hydroxyproline
  MOD_RES (11)..(11): 2S, 4S-4-fluoroproline
  MOD_RES (12)..(12): Hydroxyproline
  MOD_RES (14)..(14): 2S, 4S-4-fluoroproline
  MOD_RES (15)..(15): Hydroxyproline
  MOD_RES (17)..(17): 2S, 4S-4-fluoroproline
  MOD_RES (18)..(18): Hydroxyproline
  MOD_RES (20)..(20): 2S, 4S-4-fluoroproline
  MOD_RES (21)..(21): Hydroxyproline
  MOD_RES (23)..(23): 2S, 4S-4-fluoroproline
  MOD_RES (24)..(24): Hydroxyproline
  MOD_RES (26)..(26): 2S, 4S-4-fluoroproline
  MOD_RES (27)..(27): Hydroxyproline
  MOD_RES (29)..(29): 2S, 4S-4-fluoroproline
  MOD_RES (30)..(30): Hydroxyproline

SEQ ID NO: 41 - protein, 30 aa, Artificial Sequence; identical to SEQ ID NO: 1
  Description of Artificial Sequence: Synthetic polypeptide
  MOD_RES (5)..(5): 2S, 4S-4-fluoroproline
  MOD_RES (6)..(6): Hydroxyproline
  MOD_RES (8)..(8): 2S, 4S-4-fluoroproline
  MOD_RES (9)..(9): Hydroxyproline
  MOD_RES (11)..(11): 2S, 4S-4-fluoroproline
  MOD_RES (12)..(12): Hydroxyproline
  MOD_RES (14)..(14): 2S, 4S-4-fluoroproline
  MOD_RES (15)..(15): Hydroxyproline
  MOD_RES (17)..(17): 2S, 4S-4-fluoroproline
  MOD_RES (18)..(18): Hydroxyproline
  MOD_RES (20)..(20): 2S, 4S-4-fluoroproline
  MOD_RES (21)..(21): Hydroxyproline
  MOD_RES (23)..(23): 2S, 4S-4-fluoroproline
  MOD_RES (24)..(24): Hydroxyproline
  MOD_RES (26)..(26): 2S, 4S-4-fluoroproline
  MOD_RES (27)..(27): Hydroxyproline
  MOD_RES (29)..(29): 2S, 4S-4-fluoroproline
  MOD_RES (30)..(30): Hydroxyproline

SEQ ID NO: 42 - protein, 30 aa, Artificial Sequence; identical to SEQ ID NO: 1
  Description of Artificial Sequence: Synthetic polypeptide
  MOD_RES (5)..(5): 2S, 4S-4-fluoroproline
  MOD_RES (6)..(6): Hydroxyproline
  MOD_RES (8)..(8): 2S, 4S-4-fluoroproline
  MOD_RES (9)..(9): Hydroxyproline
  MOD_RES (11)..(11): 2S, 4S-4-fluoroproline
  MOD_RES (12)..(12): Hydroxyproline
  MOD_RES (14)..(14): 2S, 4S-4-fluoroproline
  MOD_RES (15)..(15): Hydroxyproline
  MOD_RES (17)..(17): 2S, 4S-4-fluoroproline
  MOD_RES (18)..(18): Hydroxyproline
  MOD_RES (20)..(20): 2S, 4S-4-fluoroproline
  MOD_RES (21)..(21): Hydroxyproline
  MOD_RES (23)..(23): 2S, 4S-4-fluoroproline
  MOD_RES (24)..(24): Hydroxyproline
  MOD_RES (26)..(26): 2S, 4S-4-fluoroproline
  MOD_RES (27)..(27): Hydroxyproline
  MOD_RES (29)..(29): 2S, 4S-4-fluoroproline
  MOD_RES (30)..(30): Hydroxyproline

SEQ ID NO: 43 - protein, 30 aa, Artificial Sequence; identical to SEQ ID NO: 1
  Description of Artificial Sequence: Synthetic polypeptide
  MOD_RES (5)..(5): 2S, 4S-4-fluoroproline
  MOD_RES (6)..(6): Hydroxyproline
  MOD_RES (8)..(8): 2S, 4S-4-fluoroproline
  MOD_RES (9)..(9): Hydroxyproline
  MOD_RES (11)..(11): 2S, 4S-4-fluoroproline
  MOD_RES (12)..(12): Hydroxyproline
  MOD_RES (14)..(14): 2S, 4S-4-fluoroproline
  MOD_RES (15)..(15): Hydroxyproline
  MOD_RES (17)..(17): 2S, 4S-4-fluoroproline
  MOD_RES (18)..(18): Hydroxyproline
  MOD_RES (20)..(20): 2S, 4S-4-fluoroproline
  MOD_RES (21)..(21): Hydroxyproline
  MOD_RES (23)..(23): 2S, 4S-4-fluoroproline
  MOD_RES (24)..(24): Hydroxyproline
  MOD_RES (26)..(26): 2S, 4S-4-fluoroproline
  MOD_RES (27)..(27): Hydroxyproline
  MOD_RES (29)..(29): 2S, 4S-4-fluoroproline
  MOD_RES (30)..(30): Hydroxyproline

SEQ ID NO: 44 - protein, 30 aa, Artificial Sequence; identical to SEQ ID NO: 1
  Description of Artificial Sequence: Synthetic polypeptide
  MOD_RES (5)..(5): 2S, 4S-4-fluoroproline
  MOD_RES (6)..(6): Hydroxyproline
  MOD_RES (8)..(8): 2S, 4S-4-fluoroproline
  MOD_RES (9)..(9): Hydroxyproline
  MOD_RES (11)..(11): 2S, 4S-4-fluoroproline
  MOD_RES (12)..(12): Hydroxyproline
  MOD_RES (14)..(14): 2S, 4S-4-fluoroproline
  MOD_RES (15)..(15): Hydroxyproline
  MOD_RES (17)..(17): 2S, 4S-4-fluoroproline
  MOD_RES (18)..(18): Hydroxyproline
  MOD_RES (20)..(20): 2S, 4S-4-fluoroproline
  MOD_RES (21)..(21): Hydroxyproline
  MOD_RES (23)..(23): 2S, 4S-4-fluoroproline
  MOD_RES (24)..(24): Hydroxyproline
  MOD_RES (26)..(26): 2S, 4S-4-fluoroproline
  MOD_RES (27)..(27): Hydroxyproline
  MOD_RES (29)..(29): 2S, 4S-4-fluoroproline
  MOD_RES (30)..(30): Hydroxyproline

SEQ ID NO: 45 - protein, 30 aa, Artificial Sequence; identical to SEQ ID NO: 1
  Description of Artificial Sequence: Synthetic polypeptide
  MOD_RES (5)..(5): 2S, 4S-4-fluoroproline
  MOD_RES (6)..(6): Hydroxyproline
  MOD_RES (8)..(8): 2S, 4S-4-fluoroproline
  MOD_RES (9)..(9): Hydroxyproline
  MOD_RES (11)..(11): 2S, 4S-4-fluoroproline
  MOD_RES (12)..(12): Hydroxyproline
  MOD_RES (14)..(14): 2S, 4S-4-fluoroproline
  MOD_RES (15)..(15): Hydroxyproline
  MOD_RES (17)..(17): 2S, 4S-4-fluoroproline
  MOD_RES (18)..(18): Hydroxyproline
  MOD_RES (20)..(20): 2S, 4S-4-fluoroproline
  MOD_RES (21)..(21): Hydroxyproline
  MOD_RES (23)..(23): 2S, 4S-4-fluoroproline
  MOD_RES (24)..(24): Hydroxyproline
  MOD_RES (26)..(26): 2S, 4S-4-fluoroproline
  MOD_RES (27)..(27): Hydroxyproline
  MOD_RES (29)..(29): 2S, 4S-4-fluoroproline
  MOD_RES (30)..(30): Hydroxyproline

SEQ ID NO: 46 - protein, 30 aa, Artificial Sequence; identical to SEQ ID NO: 1
  Description of Artificial Sequence: Synthetic polypeptide
  MOD_RES (5)..(5): 2S, 4S-4-fluoroproline
  MOD_RES (6)..(6): Hydroxyproline
  MOD_RES (8)..(8): 2S, 4S-4-fluoroproline
  MOD_RES (9)..(9): Hydroxyproline
  MOD_RES (11)..(11): 2S, 4S-4-fluoroproline
  MOD_RES (12)..(12): Hydroxyproline
  MOD_RES (14)..(14): 2S, 4S-4-fluoroproline
  MOD_RES (15)..(15): Hydroxyproline
  MOD_RES (17)..(17): 2S, 4S-4-fluoroproline
  MOD_RES (18)..(18): Hydroxyproline
  MOD_RES (20)..(20): 2S, 4S-4-fluoroproline
  MOD_RES (21)..(21): Hydroxyproline
  MOD_RES (23)..(23): 2S, 4S-4-fluoroproline
  MOD_RES (24)..(24): Hydroxyproline
  MOD_RES (26)..(26): 2S, 4S-4-fluoroproline
  MOD_RES (27)..(27): Hydroxyproline
  MOD_RES (29)..(29): 2S, 4S-4-fluoroproline
  MOD_RES (30)..(30): Hydroxyproline

SEQ ID NO: 47 - protein, 30 aa, Artificial Sequence; identical to SEQ ID NO: 1
  Description of Artificial Sequence: Synthetic polypeptide
  MOD_RES (5)..(5): 2S, 4S-4-fluoroproline
  MOD_RES (6)..(6): Hydroxyproline
  MOD_RES (8)..(8): 2S, 4S-4-fluoroproline
  MOD_RES (9)..(9): Hydroxyproline
  MOD_RES (11)..(11): 2S, 4S-4-fluoroproline
  MOD_RES (12)..(12): Hydroxyproline
  MOD_RES (14)..(14): 2S, 4S-4-fluoroproline
  MOD_RES (15)..(15): Hydroxyproline
  MOD_RES (17)..(17): 2S, 4S-4-fluoroproline
  MOD_RES (18)..(18): Hydroxyproline
  MOD_RES (20)..(20): 2S, 4S-4-fluoroproline
  MOD_RES (21)..(21): Hydroxyproline
  MOD_RES (23)..(23): 2S, 4S-4-fluoroproline
  MOD_RES (24)..(24): Hydroxyproline
  MOD_RES (26)..(26): 2S, 4S-4-fluoroproline
  MOD_RES (27)..(27): Hydroxyproline
  MOD_RES (29)..(29): 2S, 4S-4-fluoroproline
  MOD_RES (30)..(30): Hydroxyproline

SEQ ID NO: 48 - protein, 30 aa, Artificial Sequence; identical to SEQ ID NO: 1
  Description of Artificial Sequence: Synthetic polypeptide
  MOD_RES (5)..(5): 2S, 4S-4-fluoroproline
  MOD_RES (6)..(6): Hydroxyproline
  MOD_RES (8)..(8): 2S, 4S-4-fluoroproline
  MOD_RES (9)..(9): Hydroxyproline
  MOD_RES (11)..(11): 2S, 4S-4-fluoroproline
  MOD_RES (12)..(12): Hydroxyproline
  MOD_RES (14)..(14): 2S, 4S-4-fluoroproline
  MOD_RES (15)..(15): Hydroxyproline
  MOD_RES (17)..(17): 2S, 4S-4-fluoroproline
  MOD_RES (18)..(18): Hydroxyproline
  MOD_RES (20)..(20): 2S, 4S-4-fluoroproline
  MOD_RES (21)..(21): Hydroxyproline
  MOD_RES (23)..(23): 2S, 4S-4-fluoroproline
  MOD_RES (24)..(24): Hydroxyproline
  MOD_RES (26)..(26): 2S, 4S-4-fluoroproline
  MOD_RES (27)..(27): Hydroxyproline
  MOD_RES (29)..(29): 2S, 4S-4-fluoroproline
  MOD_RES (30)..(30): Hydroxyproline

SEQ ID NO: 49 - protein, 30 aa, Artificial Sequence; identical to SEQ ID NO: 1
  Description of Artificial Sequence: Synthetic polypeptide
  MOD_RES (5)..(5): 2S, 4S-4-fluoroproline
  MOD_RES (6)..(6): Hydroxyproline
  MOD_RES (8)..(8): 2S, 4S-4-fluoroproline
  MOD_RES (9)..(9): Hydroxyproline
  MOD_RES (11)..(11): 2S, 4S-4-fluoroproline
  MOD_RES (12)..(12): Hydroxyproline
  MOD_RES (14)..(14): 2S, 4S-4-fluoroproline
  MOD_RES (15)..(15): Hydroxyproline
  MOD_RES (17)..(17): 2S, 4S-4-fluoroproline
  MOD_RES (18)..(18): Hydroxyproline
  MOD_RES (20)..(20): 2S, 4S-4-fluoroproline
  MOD_RES (21)..(21): Hydroxyproline
  MOD_RES (23)..(23): 2S, 4S-4-fluoroproline
  MOD_RES (24)..(24): Hydroxyproline
  MOD_RES (26)..(26): 2S, 4S-4-fluoroproline
  MOD_RES (27)..(27): Hydroxyproline
  MOD_RES (29)..(29): 2S, 4S-4-fluoroproline
  MOD_RES (30)..(30): Hydroxyproline

SEQ ID NO: 50 - protein, 30 aa, Artificial Sequence; identical to SEQ ID NO: 1
  Description of Artificial Sequence: Synthetic polypeptide
  MOD_RES (5)..(5): 2S, 4S-4-fluoroproline
  MOD_RES (6)..(6): Hydroxyproline
  MOD_RES (8)..(8): 2S, 4S-4-fluoroproline
  MOD_RES (9)..(9): Hydroxyproline
  MOD_RES (11)..(11): 2S, 4S-4-fluoroproline
  MOD_RES (12)..(12): Hydroxyproline
  MOD_RES (14)..(14): 2S, 4S-4-fluoroproline
  MOD_RES (15)..(15): Hydroxyproline
  MOD_RES (17)..(17): 2S, 4S-4-fluoroproline
  MOD_RES (18)..(18): Hydroxyproline
  MOD_RES (20)..(20): 2S, 4S-4-fluoroproline
  MOD_RES (21)..(21): Hydroxyproline
  MOD_RES (23)..(23): 2S, 4S-4-fluoroproline
  MOD_RES (24)..(24): Hydroxyproline
  MOD_RES (26)..(26): 2S, 4S-4-fluoroproline
  MOD_RES (27)..(27): Hydroxyproline
  MOD_RES (29)..(29): 2S, 4S-4-fluoroproline
  MOD_RES (30)..(30): Hydroxyproline

SEQ ID NO: 51 - protein, 30 aa, Artificial Sequence; identical to SEQ ID NO: 1
  Description of Artificial Sequence: Synthetic polypeptide
  MOD_RES (5)..(5): 2S, 4S-4-fluoroproline
  MOD_RES (6)..(6): Hydroxyproline
  MOD_RES (8)..(8): 2S, 4S-4-fluoroproline
  MOD_RES (9)..(9): Hydroxyproline
  MOD_RES (11)..(11): 2S, 4S-4-fluoroproline
  MOD_RES (12)..(12): Hydroxyproline
  MOD_RES (14)..(14): 2S, 4S-4-fluoroproline
  MOD_RES (15)..(15): Hydroxyproline
  MOD_RES (17)..(17): 2S, 4S-4-fluoroproline
  MOD_RES (18)..(18): Hydroxyproline
  MOD_RES (20)..(20): 2S, 4S-4-fluoroproline
  MOD_RES (21)..(21): Hydroxyproline
  MOD_RES (23)..(23): 2S, 4S-4-fluoroproline
  MOD_RES (24)..(24): Hydroxyproline
  MOD_RES (26)..(26): 2S, 4S-4-fluoroproline
  MOD_RES (27)..(27): Hydroxyproline
  MOD_RES (29)..(29): 2S, 4S-4-fluoroproline
  MOD_RES (30)..(30): Hydroxyproline

SEQ ID NO: 52 - protein, 30 aa, Artificial Sequence; identical to SEQ ID NO: 1
  Description of Artificial Sequence: Synthetic polypeptide
  MOD_RES (5)..(5): 2S, 4S-4-fluoroproline
  MOD_RES (6)..(6): Hydroxyproline
  MOD_RES (8)..(8): 2S, 4S-4-fluoroproline
  MOD_RES (9)..(9): Hydroxyproline
  MOD_RES (11)..(11): 2S, 4S-4-fluoroproline
  MOD_RES (12)..(12): Hydroxyproline
  MOD_RES (14)..(14): 2S, 4S-4-fluoroproline
  MOD_RES (15)..(15): Hydroxyproline
  MOD_RES (17)..(17): 2S, 4S-4-fluoroproline
  MOD_RES (18)..(18): Hydroxyproline
  MOD_RES (20)..(20): 2S, 4S-4-fluoroproline
  MOD_RES (21)..(21): Hydroxyproline
  MOD_RES (23)..(23): 2S, 4S-4-fluoroproline
  MOD_RES (24)..(24): Hydroxyproline
  MOD_RES (26)..(26): 2S, 4S-4-fluoroproline
  MOD_RES (27)..(27): Hydroxyproline
  MOD_RES (29)..(29): 2S, 4S-4-fluoroproline
  MOD_RES (30)..(30): Hydroxyproline

SEQ ID NO: 53 - protein, 30 aa, Artificial Sequence; identical to SEQ ID NO: 1
  Description of Artificial Sequence: Synthetic polypeptide
  MOD_RES (5)..(5): 2S, 4S-4-fluoroproline
  MOD_RES (6)..(6): Hydroxyproline
  MOD_RES (8)..(8): 2S, 4S-4-fluoroproline
  MOD_RES (9)..(9): Hydroxyproline
  MOD_RES (11)..(11): 2S, 4S-4-fluoroproline
  MOD_RES (12)..(12): Hydroxyproline
  MOD_RES (14)..(14): 2S, 4S-4-fluoroproline
  MOD_RES (15)..(15): Hydroxyproline
  MOD_RES (17)..(17): 2S, 4S-4-fluoroproline
  MOD_RES (18)..(18): Hydroxyproline
  MOD_RES (20)..(20): 2S, 4S-4-fluoroproline
  MOD_RES (21)..(21): Hydroxyproline
  MOD_RES (23)..(23): 2S, 4S-4-fluoroproline
  MOD_RES (24)..(24): Hydroxyproline
  MOD_RES (26)..(26): 2S, 4S-4-fluoroproline
  MOD_RES (27)..(27): Hydroxyproline
  MOD_RES (29)..(29): 2S, 4S-4-fluoroproline
  MOD_RES (30)..(30): Hydroxyproline

SEQ ID NO: 54 - protein, 30 aa, Artificial Sequence; identical to SEQ ID NO: 1
  Description of Artificial Sequence: Synthetic polypeptide
  MOD_RES (5)..(5): 2S, 4S-4-fluoroproline
  MOD_RES (6)..(6): Hydroxyproline
  MOD_RES (8)..(8): 2S, 4S-4-fluoroproline
  MOD_RES (9)..(9): Hydroxyproline
  MOD_RES (11)..(11): 2S, 4S-4-fluoroproline
  MOD_RES (12)..(12): Hydroxyproline
  MOD_RES (14)..(14): 2S, 4S-4-fluoroproline
  MOD_RES (15)..(15): Hydroxyproline
  MOD_RES (17)..(17): 2S, 4S-4-fluoroproline
  MOD_RES (18)..(18): Hydroxyproline
  MOD_RES (20)..(20): 2S, 4S-4-fluoroproline
  MOD_RES (21)..(21): Hydroxyproline
  MOD_RES (23)..(23): 2S, 4S-4-fluoroproline
  MOD_RES (24)..(24): Hydroxyproline
  MOD_RES (26)..(26): 2S, 4S-4-fluoroproline
  MOD_RES (27)..(27): Hydroxyproline
  MOD_RES (29)..(29): 2S, 4S-4-fluoroproline
  MOD_RES (30)..(30): Hydroxyproline

SEQ ID NO: 55 - protein, 30 aa, Artificial Sequence; identical to SEQ ID NO: 1
  Description of Artificial Sequence: Synthetic polypeptide
  MOD_RES (5)..(5): 2S, 4S-4-fluoroproline
  MOD_RES (6)..(6): Hydroxyproline
  MOD_RES (8)..(8): 2S, 4S-4-fluoroproline
  MOD_RES (9)..(9): Hydroxyproline
  MOD_RES (11)..(11): 2S, 4S-4-fluoroproline
  MOD_RES (12)..(12): Hydroxyproline
  MOD_RES (14)..(14): 2S, 4S-4-fluoroproline
  MOD_RES (15)..(15): Hydroxyproline
  MOD_RES (17)..(17): 2S, 4S-4-fluoroproline
  MOD_RES (18)..(18): Hydroxyproline
  MOD_RES (20)..(20): 2S, 4S-4-fluoroproline
  MOD_RES (21)..(21): Hydroxyproline
  MOD_RES (23)..(23): 2S, 4S-4-fluoroproline
  MOD_RES (24)..(24): Hydroxyproline
  MOD_RES (26)..(26): 2S, 4S-4-fluoroproline
  MOD_RES (27)..(27): Hydroxyproline
  MOD_RES (29)..(29): 2S, 4S-4-fluoroproline
  MOD_RES (30)..(30): Hydroxyproline

SEQ ID NO: 56 - protein, 30 aa, Artificial Sequence; identical to SEQ ID NO: 1
  Description of Artificial Sequence: Synthetic polypeptide
  MOD_RES (5)..(5): 2S, 4S-4-fluoroproline
  MOD_RES (6)..(6): Hydroxyproline
  MOD_RES (8)..(8): 2S, 4S-4-fluoroproline
  MOD_RES (9)..(9): Hydroxyproline
  MOD_RES (11)..(11): 2S, 4S-4-fluoroproline
  MOD_RES (12)..(12): Hydroxyproline
  MOD_RES (14)..(14): 2S, 4S-4-fluoroproline
  MOD_RES (15)..(15): Hydroxyproline
  MOD_RES (17)..(17): 2S, 4S-4-fluoroproline
  MOD_RES (18)..(18): Hydroxyproline
  MOD_RES (20)..(20): 2S, 4S-4-fluoroproline
  MOD_RES (21)..(21): Hydroxyproline
  MOD_RES (23)..(23): 2S, 4S-4-fluoroproline
  MOD_RES (24)..(24): Hydroxyproline
  MOD_RES (26)..(26): 2S, 4S-4-fluoroproline
  MOD_RES (27)..(27): Hydroxyproline
  MOD_RES (29)..(29): 2S, 4S-4-fluoroproline
  MOD_RES (30)..(30): Hydroxyproline

SEQ ID NO: 57 - protein, 28 aa, Artificial Sequence
  Description of Artificial Sequence: Synthetic peptide
  MOD_RES (1)..(1): 6-aminohexanoic acid
  MOD_RES (4)..(4): Hydroxyproline
  MOD_RES (7)..(7): Hydroxyproline
  MOD_RES (10)..(10): Hydroxyproline
  MOD_RES (13)..(13): Hydroxyproline
  MOD_RES (16)..(16): Hydroxyproline
  MOD_RES (19)..(19): Hydroxyproline
  MOD_RES (22)..(22): Hydroxyproline
  MOD_RES (25)..(25): Hydroxyproline
  MOD_RES (28)..(28): Hydroxyproline
XGPPGPPGPPGPPGPPGPPGPPGPPGPP

SEQ ID NO: 58 - protein, 28 aa, Artificial Sequence
  Description of Artificial Sequence: Synthetic peptide
  MOD_RES (1)..(1): 6-aminohexanoic acid
  MOD_RES (4)..(4): Hydroxyproline
  MOD_RES (7)..(7): Hydroxyproline
  MOD_RES (10)..(10): Hydroxyproline
  MOD_RES (13)..(13): Hydroxyproline
  MOD_RES (16)..(16): Hydroxyproline
  MOD_RES (19)..(19): Hydroxyproline
  MOD_RES (22)..(22): Hydroxyproline
  MOD_RES (25)..(25): Hydroxyproline
  MOD_RES (28)..(28): Hydroxyproline
XGPPGPPGPPGPPGPPGPPGPPGPPGPP

SEQ ID NO: 59 - protein, 28 aa, Artificial Sequence
  Description of Artificial Sequence: Synthetic peptide
  MOD_RES (1)..(1): 6-aminohexanoic acid
  MOD_RES (4)..(4): Hydroxyproline
  MOD_RES (7)..(7): Hydroxyproline
  MOD_RES (10)..(10): Hydroxyproline
  MOD_RES (13)..(13): Hydroxyproline
  MOD_RES (16)..(16): Hydroxyproline
  MOD_RES (19)..(19): Hydroxyproline
  MOD_RES (22)..(22): Hydroxyproline
  MOD_RES (25)..(25): Hydroxyproline
  MOD_RES (28)..(28): Hydroxyproline
XGPPGPPGPPGPPGPPGPPGPPGPPGPP

SEQ ID NO: 60 - protein, 28 aa, Artificial Sequence
  Description of Artificial Sequence: Synthetic peptide
  MOD_RES (1)..(1): 6-aminohexanoic acid
  MOD_RES (4)..(4): Hydroxyproline
  MOD_RES (7)..(7): Hydroxyproline
  MOD_RES (10)..(10): Hydroxyproline
  MOD_RES (13)..(13): Hydroxyproline
  MOD_RES (16)..(16): Hydroxyproline
  MOD_RES (19)..(19): Hydroxyproline
  MOD_RES (22)..(22): Hydroxyproline
  MOD_RES (25)..(25): Hydroxyproline
  MOD_RES (28)..(28): Hydroxyproline
XGPPGPPGPPGPPGPPGPPGPPGPPGPP

SEQ ID NO: 61 - protein, 28 aa, Artificial Sequence
  Description of Artificial Sequence: Synthetic peptide
  MOD_RES (1)..(1): 6-aminohexanoic acid
  MOD_RES (4)..(4): Hydroxyproline
  MOD_RES (7)..(7): Hydroxyproline
  MOD_RES (10)..(10): Hydroxyproline
  MOD_RES (13)..(13): Hydroxyproline
  MOD_RES (16)..(16): Hydroxyproline
  MOD_RES (19)..(19): Hydroxyproline
  MOD_RES (22)..(22): Hydroxyproline
  MOD_RES (25)..(25): Hydroxyproline
  MOD_RES (28)..(28): Hydroxyproline
XGPPGPPGPPGPPGPPGPPGPPGPPGPP

SEQ ID NO: 62 - protein, 28 aa, Artificial Sequence
  Description of Artificial Sequence: Synthetic peptide
  MOD_RES (1)..(1): 6-aminohexanoic acid
  MOD_RES (4)..(4): Hydroxyproline
  MOD_RES (7)..(7): Hydroxyproline
  MOD_RES (10)..(10): Hydroxyproline
  MOD_RES (13)..(13): Hydroxyproline
  MOD_RES (16)..(16): Hydroxyproline
  MOD_RES (19)..(19): Hydroxyproline
  MOD_RES (22)..(22): Hydroxyproline
  MOD_RES (25)..(25): Hydroxyproline
  MOD_RES (28)..(28): Hydroxyproline
XGPPGPPGPPGPPGPPGPPGPPGPPGPP

SEQ ID NO: 63 - protein, 28 aa, Artificial Sequence
  Description of Artificial Sequence: Synthetic peptide
  MOD_RES (1)..(1): 6-aminohexanoic acid
  MOD_RES (4)..(4): Hydroxyproline
  MOD_RES (7)..(7): Hydroxyproline
  MOD_RES (10)..(10): Hydroxyproline
  MOD_RES (13)..(13): Hydroxyproline
  MOD_RES (16)..(16): Hydroxyproline
  MOD_RES (19)..(19): Hydroxyproline
  MOD_RES (22)..(22): Hydroxyproline
  MOD_RES (25)..(25): Hydroxyproline
  MOD_RES (28)..(28): Hydroxyproline
XGPPGPPGPPGPPGPPGPPGPPGPPGPP

SEQ ID NO: 64 - protein, 28 aa, Artificial Sequence
  Description of Artificial Sequence: Synthetic peptide
  MOD_RES (1)..(1): 6-aminohexanoic acid
  MOD_RES (4)..(4): Hydroxyproline
  MOD_RES (7)..(7): Hydroxyproline
  MOD_RES (10)..(10): Hydroxyproline
  MOD_RES (13)..(13): Hydroxyproline
  MOD_RES (16)..(16): Hydroxyproline
  MOD_RES (19)..(19): Hydroxyproline
  MOD_RES (22)..(22): Hydroxyproline
  MOD_RES (25)..(25): Hydroxyproline
  MOD_RES (28)..(28): Hydroxyproline
XGPPGPPGPPGPPGPPGPPGPPGPPGPP

SEQ ID NO: 65 - protein, 28 aa, Artificial Sequence
  Description of Artificial Sequence: Synthetic peptide
  MOD_RES (1)..(1): 6-aminohexanoic acid
  MOD_RES (4)..(4): Hydroxyproline
  MOD_RES (7)..(7): Hydroxyproline
  MOD_RES (10)..(10): Hydroxyproline
  MOD_RES (13)..(13): Hydroxyproline
  MOD_RES (16)..(16): Hydroxyproline
  MOD_RES (19)..(19): Hydroxyproline
  MOD_RES (22)..(22): Hydroxyproline
  MOD_RES (25)..(25): Hydroxyproline
  MOD_RES (28)..(28): Hydroxyproline
XGPPGPPGPPGPPGPPGPPGPPGPPGPP

SEQ ID NO: 66 - protein, 28 aa, Artificial Sequence
  Description of Artificial Sequence: Synthetic peptide
  MOD_RES (1)..(1): 6-aminohexanoic acid
  MOD_RES (4)..(4): Hydroxyproline
  MOD_RES (7)..(7): Hydroxyproline
  MOD_RES (10)..(10): Hydroxyproline
  MOD_RES (13)..(13): Hydroxyproline
  MOD_RES (16)..(16): Hydroxyproline
  MOD_RES (19)..(19): Hydroxyproline
  MOD_RES (22)..(22): Hydroxyproline
  MOD_RES (25)..(25): Hydroxyproline
  MOD_RES (28)..(28): Hydroxyproline
XGPPGPPGPPGPPGPPGPPGPPGPPGPP

SEQ ID NO: 67 - protein, 28 aa, Artificial Sequence
  Description of Artificial Sequence: Synthetic peptide
  MOD_RES (1)..(1): 6-aminohexanoic acid
  MOD_RES (4)..(4): Hydroxyproline
  MOD_RES (7)..(7): Hydroxyproline
  MOD_RES (10)..(10): Hydroxyproline
  MOD_RES (13)..(13): Hydroxyproline
  MOD_RES (16)..(16): Hydroxyproline
  MOD_RES (19)..(19): Hydroxyproline
  MOD_RES (22)..(22): Hydroxyproline
  MOD_RES (25)..(25): Hydroxyproline
  MOD_RES (28)..(28): Hydroxyproline
XGPPGPPGPPGPPGPPGPPGPPGPPGPP

SEQ ID NO: 68 - protein, 28 aa, Artificial Sequence
  Description of Artificial Sequence: Synthetic peptide
  MOD_RES (1)..(1): 6-aminohexanoic acid
  MOD_RES (4)..(4): Hydroxyproline
  MOD_RES (7)..(7): Hydroxyproline
  MOD_RES (10)..(10): Hydroxyproline
  MOD_RES (13)..(13): Hydroxyproline
  MOD_RES (16)..(16): Hydroxyproline
  MOD_RES (19)..(19): Hydroxyproline
  MOD_RES (22)..(22): Hydroxyproline
  MOD_RES (25)..(25): Hydroxyproline
  MOD_RES (28)..(28): Hydroxyproline
XGPPGPPGPPGPPGPPGPPGPPGPPGPP

SEQ ID NO: 69 - protein, 28 aa, Artificial Sequence
  Description of Artificial Sequence: Synthetic peptide
  MOD_RES (1)..(1): 6-aminohexanoic acid
  MOD_RES (4)..(4): Hydroxyproline
  MOD_RES (7)..(7): Hydroxyproline
  MOD_RES (10)..(10): Hydroxyproline
  MOD_RES (13)..(13): Hydroxyproline
  MOD_RES (16)..(16): Hydroxyproline
  MOD_RES (19)..(19): Hydroxyproline
  MOD_RES (22)..(22): Hydroxyproline
  MOD_RES (25)..(25): Hydroxyproline
  MOD_RES (28)..(28): Hydroxyproline
XGPPGPPGPPGPPGPPGPPGPPGPPGPP

SEQ ID NO: 70 - protein, 28 aa, Artificial Sequence
  Description of Artificial Sequence: Synthetic peptide
  MOD_RES (1)..(1): 6-aminohexanoic acid
  MOD_RES (4)..(4): Hydroxyproline
  MOD_RES (7)..(7): Hydroxyproline
  MOD_RES (10)..(10): Hydroxyproline
  MOD_RES (13)..(13): Hydroxyproline
  MOD_RES (16)..(16): Hydroxyproline
  MOD_RES (19)..(19): Hydroxyproline
  MOD_RES (22)..(22): Hydroxyproline
  MOD_RES (25)..(25): Hydroxyproline
  MOD_RES (28)..(28): Hydroxyproline
XGPPGPPGPPGPPGPPGPPGPPGPPGPP

SEQ ID NO: 71 - protein, 28 aa, Artificial Sequence
  Description of Artificial Sequence: Synthetic peptide
  MOD_RES (1)..(1): 6-aminohexanoic acid
  MOD_RES (4)..(4): Hydroxyproline
  MOD_RES (7)..(7): Hydroxyproline
  MOD_RES (10)..(10): Hydroxyproline
  MOD_RES (13)..(13): Hydroxyproline
  MOD_RES (16)..(16): Hydroxyproline
  MOD_RES (19)..(19): Hydroxyproline
  MOD_RES (22)..(22): Hydroxyproline
  MOD_RES (25)..(25): Hydroxyproline
  MOD_RES (28)..(28): Hydroxyproline
XGPPGPPGPPGPPGPPGPPGPPGPPGPP

SEQ ID NO: 72 - protein, 28 aa, Artificial Sequence
  Description of Artificial Sequence: Synthetic peptide
  MOD_RES (1)..(1): 6-aminohexanoic acid
  MOD_RES (4)..(4): Hydroxyproline
  MOD_RES (7)..(7): Hydroxyproline
  MOD_RES (10)..(10): Hydroxyproline
  MOD_RES (13)..(13): Hydroxyproline
  MOD_RES (16)..(16): Hydroxyproline
  MOD_RES (19)..(19): Hydroxyproline
  MOD_RES (22)..(22): Hydroxyproline
  MOD_RES (25)..(25): Hydroxyproline
  MOD_RES (28)..(28): Hydroxyproline
XGPPGPPGPPGPPGPPGPPGPPGPPGPP

SEQ ID NO: 73 - protein, 28 aa, Artificial Sequence
  Description of Artificial Sequence: Synthetic peptide
  MOD_RES (1)..(1): 6-aminohexanoic acid
  MOD_RES (4)..(4): Hydroxyproline
  MOD_RES (7)..(7): Hydroxyproline
  MOD_RES (10)..(10): Hydroxyproline
  MOD_RES (13)..(13): Hydroxyproline
  MOD_RES (16)..(16): Hydroxyproline
  MOD_RES (19)..(19): Hydroxyproline
  MOD_RES (22)..(22): Hydroxyproline
  MOD_RES (25)..(25): Hydroxyproline
  MOD_RES (28)..(28): Hydroxyproline
XGPPGPPGPPGPPGPPGPPGPPGPPGPP

SEQ ID NO: 74 - protein, 28 aa, Artificial Sequence
  Description of Artificial Sequence: Synthetic peptide
  MOD_RES (1)..(1): 6-aminohexanoic acid
  MOD_RES (4)..(4): Hydroxyproline
  MOD_RES (7)..(7): Hydroxyproline
  MOD_RES (10)..(10): Hydroxyproline
  MOD_RES (13)..(13): Hydroxyproline
  MOD_RES (16)..(16): Hydroxyproline
  MOD_RES (19)..(19): Hydroxyproline
  MOD_RES (22)..(22): Hydroxyproline
  MOD_RES (25)..(25): Hydroxyproline
  MOD_RES (28)..(28): Hydroxyproline
XGPPGPPGPPGPPGPPGPPGPPGPPGPP

SEQ ID NO: 75 - protein, 28 aa, Artificial Sequence
  Description of Artificial Sequence: Synthetic peptide
  MOD_RES (1)..(1): 6-aminohexanoic acid
  MOD_RES (4)..(4): Hydroxyproline
  MOD_RES (7)..(7): Hydroxyproline
  MOD_RES (10)..(10): Hydroxyproline
  MOD_RES (13)..(13): Hydroxyproline
  MOD_RES (16)..(16): Hydroxyproline
  MOD_RES (19)..(19): Hydroxyproline
  MOD_RES (22)..(22): Hydroxyproline
  MOD_RES (25)..(25): Hydroxyproline
  MOD_RES (28)..(28): Hydroxyproline
XGPPGPPGPPGPPGPPGPPGPPGPPGPP

SEQ ID NO: 76 - protein, 28 aa, Artificial Sequence
  Description of Artificial Sequence: Synthetic peptide
  MOD_RES (1)..(1): 6-aminohexanoic acid
  MOD_RES (4)..(4): Hydroxyproline
  MOD_RES (7)..(7): Hydroxyproline
  MOD_RES (10)..(10): Hydroxyproline
  MOD_RES (13)..(13): Hydroxyproline
  MOD_RES (16)..(16): Hydroxyproline
  MOD_RES (19)..(19): Hydroxyproline
  MOD_RES (22)..(22): Hydroxyproline
  MOD_RES (25)..(25): Hydroxyproline
  MOD_RES (28)..(28): Hydroxyproline
XGPPGPPGPPGPPGPPGPPGPPGPPGPP

SEQ ID NO: 77 - protein, 28 aa, Artificial Sequence
  Description of Artificial Sequence: Synthetic peptide
  MOD_RES (1)..(1): 6-aminohexanoic acid
  MOD_RES (4)..(4): Hydroxyproline
  MOD_RES (7)..(7): Hydroxyproline
  MOD_RES (10)..(10): Hydroxyproline
  MOD_RES (13)..(13): Hydroxyproline
  MOD_RES (16)..(16): Hydroxyproline
  MOD_RES (19)..(19): Hydroxyproline
  MOD_RES (22)..(22): Hydroxyproline
  MOD_RES (25)..(25): Hydroxyproline
  MOD_RES (28)..(28): Hydroxyproline
XGPPGPPGPPGPPGPPGPPGPPGPPGPP

SEQ ID NO: 78 - protein, 28 aa, Artificial Sequence
  Description of Artificial Sequence: Synthetic peptide
  MOD_RES (1)..(1): 6-aminohexanoic acid
  MOD_RES (4)..(4): Hydroxyproline
  MOD_RES (7)..(7): Hydroxyproline
  MOD_RES (10)..(10): Hydroxyproline
  MOD_RES (13)..(13): Hydroxyproline
  MOD_RES (16)..(16): Hydroxyproline
  MOD_RES (19)..(19): Hydroxyproline
  MOD_RES (22)..(22): Hydroxyproline
  MOD_RES (25)..(25): Hydroxyproline
  MOD_RES (28)..(28): Hydroxyproline
XGPPGPPGPPGPPGPPGPPGPPGPPGPP

SEQ ID NO: 79 - protein, 28 aa, Artificial Sequence
  Description of Artificial Sequence: Synthetic peptide
  MOD_RES (1)..(1): 6-aminohexanoic acid
  MOD_RES (4)..(4): Hydroxyproline
  MOD_RES (7)..(7): Hydroxyproline
  MOD_RES (10)..(10): Hydroxyproline
  MOD_RES (13)..(13): Hydroxyproline
  MOD_RES (16)..(16): Hydroxyproline
  MOD_RES (19)..(19): Hydroxyproline
  MOD_RES (22)..(22): Hydroxyproline
  MOD_RES (25)..(25): Hydroxyproline
  MOD_RES (28)..(28): Hydroxyproline
XGPPGPPGPPGPPGPPGPPGPPGPPGPP

SEQ ID NO: 80 - protein, 28 aa, Artificial Sequence
  Description of Artificial Sequence: Synthetic peptide
  MOD_RES (1)..(1): 6-aminohexanoic acid
  MOD_RES (4)..(4): Hydroxyproline
  MOD_RES (7)..(7): Hydroxyproline
  MOD_RES (10)..(10): Hydroxyproline
  MOD_RES (13)..(13): Hydroxyproline
  MOD_RES (16)..(16): Hydroxyproline
  MOD_RES (19)..(19): Hydroxyproline
  MOD_RES (22)..(22): Hydroxyproline
  MOD_RES (25)..(25): Hydroxyproline
  MOD_RES (28)..(28): Hydroxyproline
XGPPGPPGPPGPPGPPGPPGPPGPPGPP

SEQ ID NO: 81 - protein, 28 aa, Artificial Sequence
  Description of Artificial Sequence: Synthetic peptide
  MOD_RES (1)..(1): 6-aminohexanoic acid
  MOD_RES (4)..(4): Hydroxyproline
  MOD_RES (7)..(7): Hydroxyproline
  MOD_RES (10)..(10): Hydroxyproline
  MOD_RES (13)..(13): Hydroxyproline
  MOD_RES (16)..(16): Hydroxyproline
  MOD_RES (19)..(19): Hydroxyproline
  MOD_RES (22)..(22): Hydroxyproline
  MOD_RES (25)..(25): Hydroxyproline
  MOD_RES (28)..(28): Hydroxyproline
XGPPGPPGPPGPPGPPGPPGPPGPPGPP

SEQ ID NO: 82 - protein, 28 aa, Artificial Sequence
  Description of Artificial Sequence: Synthetic peptide
  MOD_RES (1)..(1): 6-aminohexanoic acid
  MOD_RES (4)..(4): Hydroxyproline
  MOD_RES (7)..(7): Hydroxyproline
  MOD_RES (10)..(10): Hydroxyproline
  MOD_RES (13)..(13): Hydroxyproline
  MOD_RES (16)..(16): Hydroxyproline
  MOD_RES (19)..(19): Hydroxyproline
  MOD_RES (22)..(22): Hydroxyproline
  MOD_RES (25)..(25): Hydroxyproline
  MOD_RES (28)..(28): Hydroxyproline
XGPPGPPGPPGPPGPPGPPGPPGPPGPP

SEQ ID NO: 83 - protein, 28 aa, Artificial Sequence
  Description of Artificial Sequence: Synthetic peptide
  MOD_RES (1)..(1): 6-aminohexanoic acid
  MOD_RES (4)..(4): Hydroxyproline
  MOD_RES (7)..(7): Hydroxyproline
  MOD_RES (10)..(10): Hydroxyproline
  MOD_RES (13)..(13): Hydroxyproline
  MOD_RES (16)..(16): Hydroxyproline
  MOD_RES (19)..(19): Hydroxyproline
  MOD_RES (22)..(22): Hydroxyproline
  MOD_RES (25)..(25): Hydroxyproline
  MOD_RES (28)..(28): Hydroxyproline
XGPPGPPGPPGPPGPPGPPGPPGPPGPP

SEQ ID NO: 84 - protein, 28 aa, Artificial Sequence
  Description of Artificial Sequence: Synthetic peptide
  MOD_RES (1)..(1): 6-aminohexanoic acid
  MOD_RES (4)..(4): Hydroxyproline
  MOD_RES (7)..(7): Hydroxyproline
  MOD_RES (10)..(10): Hydroxyproline
  MOD_RES (13)..(13): Hydroxyproline
  MOD_RES (16)..(16): Hydroxyproline
  MOD_RES (19)..(19): Hydroxyproline
  MOD_RES (22)..(22): Hydroxyproline
  MOD_RES (25)..(25): Hydroxyproline
  MOD_RES (28)..(28): Hydroxyproline
XGPPGPPGPPGPPGPPGPPGPPGPPGPP

SEQ ID NO: 85 - protein, 28 aa, Artificial Sequence
  Description of Artificial Sequence: Synthetic peptide
  MOD_RES (1)..(1): 6-aminohexanoic acid
  MOD_RES (3)..(3): 2S, 4S-4-fluoroproline
  MOD_RES (4)..(4): Hydroxyproline
  MOD_RES (6)..(6): 2S, 4S-4-fluoroproline
  MOD_RES (7)..(7): Hydroxyproline
  MOD_RES (9)..(9): 2S, 4S-4-fluoroproline
  MOD_RES (10)..(10): Hydroxyproline
  MOD_RES (12)..(12): 2S, 4S-4-fluoroproline
  MOD_RES (13)..(13): Hydroxyproline
  MOD_RES (15)..(15): 2S, 4S-4-fluoroproline
  MOD_RES (16)..(16): Hydroxyproline
  MOD_RES (18)..(18): 2S, 4S-4-fluoroproline
  MOD_RES (19)..(19): Hydroxyproline
  MOD_RES (21)..(21): 2S, 4S-4-fluoroproline
  MOD_RES (22)..(22): Hydroxyproline
  MOD_RES (24)..(24): 2S, 4S-4-fluoroproline
  MOD_RES (25)..(25): Hydroxyproline
  MOD_RES (27)..(27): 2S, 4S-4-fluoroproline
  MOD_RES (28)..(28): Hydroxyproline
XGPPGPPGPPGPPGPPGPPGPPGPPGPP

SEQ ID NO: 86 - protein, 28 aa, Artificial Sequence
  Description of Artificial Sequence: Synthetic peptide
  MOD_RES (1)..(1): 6-aminohexanoic acid
  MOD_RES (3)..(3): 2S, 4S-4-fluoroproline
  MOD_RES (4)..(4): Hydroxyproline
  MOD_RES (6)..(6): 2S, 4S-4-fluoroproline
  MOD_RES (7)..(7): Hydroxyproline
  MOD_RES (9)..(9): 2S, 4S-4-fluoroproline
  MOD_RES (10)..(10): Hydroxyproline
  MOD_RES (12)..(12): 2S, 4S-4-fluoroproline
  MOD_RES (13)..(13): Hydroxyproline
  MOD_RES (15)..(15): 2S, 4S-4-fluoroproline
  MOD_RES (16)..(16): Hydroxyproline
  MOD_RES (18)..(18): 2S, 4S-4-fluoroproline
  MOD_RES (19)..(19): Hydroxyproline
  MOD_RES (21)..(21): 2S, 4S-4-fluoroproline
  MOD_RES (22)..(22): Hydroxyproline
  MOD_RES (24)..(24): 2S, 4S-4-fluoroproline
  MOD_RES (25)..(25): Hydroxyproline
  MOD_RES (27)..(27): 2S, 4S-4-fluoroproline
  MOD_RES (28)..(28): Hydroxyproline
XGPPGPPGPPGPPGPPGPPGPPGPPGPP

SEQ ID NO: 87 - protein, 28 aa, Artificial Sequence
  Description of Artificial Sequence: Synthetic peptide
  MOD_RES (1)..(1): 6-aminohexanoic acid
  MOD_RES (3)..(3): 2S, 4S-4-fluoroproline
  MOD_RES (4)..(4): Hydroxyproline
  MOD_RES (6)..(6): 2S, 4S-4-fluoroproline
  MOD_RES (7)..(7): Hydroxyproline
  MOD_RES (9)..(9): 2S, 4S-4-fluoroproline
  MOD_RES (10)..(10): Hydroxyproline
  MOD_RES (12)..(12): 2S, 4S-4-fluoroproline
  MOD_RES (13)..(13): Hydroxyproline
  MOD_RES (15)..(15): 2S, 4S-4-fluoroproline
  MOD_RES (16)..(16): Hydroxyproline
  MOD_RES (18)..(18): 2S, 4S-4-fluoroproline
  MOD_RES (19)..(19): Hydroxyproline
  MOD_RES (21)..(21): 2S, 4S-4-fluoroproline
  MOD_RES (22)..(22): Hydroxyproline
  MOD_RES (24)..(24): 2S, 4S-4-fluoroproline
  MOD_RES (25)..(25): Hydroxyproline
  MOD_RES (27)..(27): 2S, 4S-4-fluoroproline
  MOD_RES (28)..(28): Hydroxyproline
XGPPGPPGPPGPPGPPGPPGPPGPPGPP

SEQ ID NO: 88 - protein, 28 aa, Artificial Sequence
  Description of Artificial Sequence: Synthetic peptide
  MOD_RES (1)..(1): 6-aminohexanoic acid
  MOD_RES (3)..(3): 2S, 4S-4-fluoroproline
  MOD_RES (4)..(4): Hydroxyproline
  MOD_RES (6)..(6): 2S, 4S-4-fluoroproline
  MOD_RES (7)..(7): Hydroxyproline
  MOD_RES (9)..(9): 2S, 4S-4-fluoroproline
  MOD_RES (10)..(10): Hydroxyproline
  MOD_RES (12)..(12): 2S, 4S-4-fluoroproline
  MOD_RES (13)..(13): Hydroxyproline
  MOD_RES (15)..(15): 2S, 4S-4-fluoroproline
  MOD_RES (16)..(16): Hydroxyproline
  MOD_RES (18)..(18): 2S, 4S-4-fluoroproline
  MOD_RES (19)..(19): Hydroxyproline
  MOD_RES (21)..(21): 2S, 4S-4-fluoroproline
  MOD_RES (22)..(22): Hydroxyproline
  MOD_RES (24)..(24): 2S, 4S-4-fluoroproline
  MOD_RES (25)..(25): Hydroxyproline
  MOD_RES (27)..(27): 2S, 4S-4-fluoroproline
  MOD_RES (28)..(28): Hydroxyproline
XGPPGPPGPPGPPGPPGPPGPPGPPGPP

SEQ ID NO: 89 - protein, 28 aa, Artificial Sequence
  Description of Artificial Sequence: Synthetic peptide
  MOD_RES (1)..(1): 6-aminohexanoic acid
  MOD_RES (3)..(3): 2S, 4S-4-fluoroproline
  MOD_RES (4)..(4): Hydroxyproline
  MOD_RES (6)..(6): 2S, 4S-4-fluoroproline
  MOD_RES (7)..(7): Hydroxyproline
  MOD_RES (9)..(9): 2S, 4S-4-fluoroproline
  MOD_RES (10)..(10): Hydroxyproline
  MOD_RES (12)..(12): 2S, 4S-4-fluoroproline
  MOD_RES (13)..(13): Hydroxyproline
  MOD_RES (15)..(15): 2S, 4S-4-fluoroproline
  MOD_RES (16)..(16): Hydroxyproline
  MOD_RES (18)..(18): 2S, 4S-4-fluoroproline
  MOD_RES (19)..(19): Hydroxyproline
  MOD_RES (21)..(21): 2S, 4S-4-fluoroproline
  MOD_RES (22)..(22): Hydroxyproline
  MOD_RES (24)..(24): 2S, 4S-4-fluoroproline
  MOD_RES (25)..(25): Hydroxyproline
  MOD_RES (27)..(27): 2S, 4S-4-fluoroproline
  MOD_RES (28)..(28): Hydroxyproline
XGPPGPPGPPGPPGPPGPPGPPGPPGPP

SEQ ID NO: 90 - protein, 28 aa, Artificial Sequence
  Description of Artificial Sequence: Synthetic peptide
  MOD_RES (1)..(1): 6-aminohexanoic acid
  MOD_RES (3)..(3): 2S, 4S-4-fluoroproline
  MOD_RES (4)..(4): Hydroxyproline
  MOD_RES (6)..(6): 2S, 4S-4-fluoroproline
  MOD_RES (7)..(7): Hydroxyproline
  MOD_RES (9)..(9): 2S, 4S-4-fluoroproline
  MOD_RES (10)..(10): Hydroxyproline
  MOD_RES (12)..(12): 2S, 4S-4-fluoroproline
  MOD_RES (13)..(13): Hydroxyproline
  MOD_RES (15)..(15): 2S, 4S-4-fluoroproline
  MOD_RES (16)..(16): Hydroxyproline
  MOD_RES (18)..(18): 2S, 4S-4-fluoroproline
  MOD_RES (19)..(19): Hydroxyproline
  MOD_RES (21)..(21): 2S, 4S-4-fluoroproline
  MOD_RES (22)..(22): Hydroxyproline
  MOD_RES (24)..(24): 2S, 4S-4-fluoroproline
  MOD_RES (25)..(25): Hydroxyproline
  MOD_RES (27)..(27): 2S, 4S-4-fluoroproline
  MOD_RES (28)..(28): Hydroxyproline
XGPPGPPGPPGPPGPPGPPGPPGPPGPP

SEQ ID NO: 91 - protein, 28 aa, Artificial Sequence
  Description of Artificial Sequence: Synthetic peptide
  MOD_RES (1)..(1): 6-aminohexanoic acid
  MOD_RES (3)..(3): 2S, 4S-4-fluoroproline
  MOD_RES (4)..(4): Hydroxyproline
  MOD_RES (6)..(6): 2S, 4S-4-fluoroproline
  MOD_RES (7)..(7): Hydroxyproline
  MOD_RES (9)..(9): 2S, 4S-4-fluoroproline
  MOD_RES (10)..(10): Hydroxyproline
  MOD_RES (12)..(12): 2S, 4S-4-fluoroproline
  MOD_RES (13)..(13): Hydroxyproline
  MOD_RES (15)..(15): 2S, 4S-4-fluoroproline
  MOD_RES (16)..(16): Hydroxyproline
  MOD_RES (18)..(18): 2S, 4S-4-fluoroproline
  MOD_RES (19)..(19): Hydroxyproline
  MOD_RES (21)..(21): 2S, 4S-4-fluoroproline
  MOD_RES (22)..(22): Hydroxyproline
  MOD_RES (24)..(24): 2S, 4S-4-fluoroproline
  MOD_RES (25)..(25): Hydroxyproline
  MOD_RES (27)..(27): 2S, 4S-4-fluoroproline
  MOD_RES (28)..(28): Hydroxyproline
XGPPGPPGPPGPPGPPGPPGPPGPPGPP

SEQ ID NO: 92 - protein, 28 aa, Artificial Sequence
  Description of Artificial Sequence: Synthetic peptide
  MOD_RES (1)..(1): 6-aminohexanoic acid
  MOD_RES (3)..(3): 2S, 4S-4-fluoroproline
  MOD_RES (4)..(4): Hydroxyproline
  MOD_RES (6)..(6): 2S, 4S-4-fluoroproline
  MOD_RES (7)..(7): Hydroxyproline
  MOD_RES (9)..(9): 2S, 4S-4-fluoroproline
  MOD_RES (10)..(10): Hydroxyproline
  MOD_RES (12)..(12): 2S, 4S-4-fluoroproline
  MOD_RES (13)..(13): Hydroxyproline
  MOD_RES (15)..(15): 2S, 4S-4-fluoroproline
  MOD_RES (16)..(16): Hydroxyproline
  MOD_RES (18)..(18): 2S, 4S-4-fluoroproline
  MOD_RES (19)..(19): Hydroxyproline
  MOD_RES (21)..(21): 2S, 4S-4-fluoroproline
  MOD_RES (22)..(22): Hydroxyproline
  MOD_RES (24)..(24): 2S, 4S-4-fluoroproline
  MOD_RES (25)..(25): Hydroxyproline
  MOD_RES (27)..(27): 2S, 4S-4-fluoroproline
  MOD_RES (28)..(28): Hydroxyproline
XGPPGPPGPPGPPGPPGPPGPPGPPGPP

SEQ ID NO: 93 - protein, 28 aa, Artificial Sequence
  Description of Artificial Sequence: Synthetic peptide
  MOD_RES (1)..(1): 6-aminohexanoic acid
  MOD_RES (3)..(3): 2S, 4S-4-fluoroproline
  MOD_RES (4)..(4): Hydroxyproline
  MOD_RES (6)..(6): 2S, 4S-4-fluoroproline
  MOD_RES (7)..(7): Hydroxyproline
  MOD_RES (9)..(9): 2S, 4S-4-fluoroproline
  MOD_RES (10)..(10): Hydroxyproline
  MOD_RES (12)..(12): 2S, 4S-4-fluoroproline
  MOD_RES (13)..(13): Hydroxyproline
  MOD_RES (15)..(15): 2S, 4S-4-fluoroproline
  MOD_RES (16)..(16): Hydroxyproline
  MOD_RES (18)..(18): 2S, 4S-4-fluoroproline
  MOD_RES (19)..(19): Hydroxyproline
  MOD_RES (21)..(21): 2S, 4S-4-fluoroproline
  MOD_RES (22)..(22): Hydroxyproline
  MOD_RES (24)..(24): 2S, 4S-4-fluoroproline
  MOD_RES (25)..(25): Hydroxyproline
  MOD_RES (27)..(27): 2S, 4S-4-fluoroproline
  MOD_RES (28)..(28): Hydroxyproline
XGPPGPPGPPGPPGPPGPPGPPGPPGPP

SEQ ID NO: 94 - protein, 28 aa, Artificial Sequence
  Description of Artificial Sequence: Synthetic peptide
  MOD_RES (1)..(1): 6-aminohexanoic acid
  MOD_RES (3)..(3): 2S, 4S-4-fluoroproline
  MOD_RES (4)..(4): Hydroxyproline
  MOD_RES (6)..(6): 2S, 4S-4-fluoroproline
  MOD_RES (7)..(7): Hydroxyproline
  MOD_RES (9)..(9): 2S, 4S-4-fluoroproline
  MOD_RES (10)..(10): Hydroxyproline
  MOD_RES (12)..(12): 2S, 4S-4-fluoroproline
  MOD_RES (13)..(13): Hydroxyproline
  MOD_RES (15)..(15): 2S, 4S-4-fluoroproline
  MOD_RES (16)..(16): Hydroxyproline
  MOD_RES (18)..(18): 2S, 4S-4-fluoroproline
  MOD_RES (19)..(19): Hydroxyproline
  MOD_RES (21)..(21): 2S, 4S-4-fluoroproline
  MOD_RES (22)..(22): Hydroxyproline
  MOD_RES (24)..(24): 2S, 4S-4-fluoroproline
  MOD_RES (25)..(25): Hydroxyproline
  MOD_RES (27)..(27): 2S, 4S-4-fluoroproline
  MOD_RES (28)..(28): Hydroxyproline
XGPPGPPGPPGPPGPPGPPGPPGPPGPP

SEQ ID NO: 95 - protein, 28 aa, Artificial Sequence
  Description of Artificial Sequence: Synthetic peptide
  MOD_RES (1)..(1): 6-aminohexanoic acid
  MOD_RES (3)..(3): 2S, 4S-4-fluoroproline
  MOD_RES (4)..(4): Hydroxyproline
  MOD_RES (6)..(6): 2S, 4S-4-fluoroproline
  MOD_RES (7)..(7): Hydroxyproline
  MOD_RES (9)..(9): 2S, 4S-4-fluoroproline
  MOD_RES (10)..(10): Hydroxyproline
  MOD_RES (12)..(12): 2S, 4S-4-fluoroproline
  MOD_RES (13)..(13): Hydroxyproline
  MOD_RES (15)..(15): 2S, 4S-4-fluoroproline
  MOD_RES (16)..(16): Hydroxyproline
  MOD_RES (18)..(18): 2S, 4S-4-fluoroproline
  MOD_RES (19)..(19): Hydroxyproline
  MOD_RES (21)..(21): 2S, 4S-4-fluoroproline
  MOD_RES (22)..(22): Hydroxyproline
  MOD_RES (24)..(24): 2S, 4S-4-fluoroproline
  MOD_RES (25)..(25): Hydroxyproline
  MOD_RES (27)..(27): 2S, 4S-4-fluoroproline
  MOD_RES (28)..(28): Hydroxyproline
XGPPGPPGPPGPPGPPGPPGPPGPPGPP

SEQ ID NO: 96 - protein, 28 aa, Artificial Sequence
  Description of Artificial Sequence: Synthetic peptide
  MOD_RES (1)..(1): 6-aminohexanoic acid
  MOD_RES (3)..(3): 2S, 4S-4-fluoroproline
  MOD_RES (4)..(4): Hydroxyproline
  MOD_RES (6)..(6): 2S, 4S-4-fluoroproline
  MOD_RES (7)..(7): Hydroxyproline
  MOD_RES (9)..(9): 2S, 4S-4-fluoroproline
  MOD_RES (10)..(10): Hydroxyproline
  MOD_RES (12)..(12): 2S, 4S-4-fluoroproline
  MOD_RES (13)..(13): Hydroxyproline
  MOD_RES (15)..(15): 2S, 4S-4-fluoroproline
  MOD_RES (16)..(16): Hydroxyproline
  MOD_RES (18)..(18): 2S, 4S-4-fluoroproline
  MOD_RES (19)..(19): Hydroxyproline
  MOD_RES (21)..(21): 2S, 4S-4-fluoroproline
  MOD_RES (22)..(22): Hydroxyproline
  MOD_RES (24)..(24): 2S, 4S-4-fluoroproline
  MOD_RES (25)..(25): Hydroxyproline
  MOD_RES (27)..(27): 2S, 4S-4-fluoroproline
  MOD_RES (28)..(28): Hydroxyproline
XGPPGPPGPPGPPGPPGPPGPPGPPGPP

SEQ ID NO: 97 - protein, 28 aa, Artificial Sequence
  Description of Artificial Sequence: Synthetic peptide
  MOD_RES (1)..(1): 6-aminohexanoic acid
  MOD_RES (3)..(3): 2S, 4S-4-fluoroproline
  MOD_RES (4)..(4): Hydroxyproline
  MOD_RES (6)..(6): 2S, 4S-4-fluoroproline
  MOD_RES (7)..(7): Hydroxyproline
  MOD_RES (9)..(9): 2S, 4S-4-fluoroproline
  MOD_RES (10)..(10): Hydroxyproline
  MOD_RES (12)..(12): 2S, 4S-4-fluoroproline
  MOD_RES (13)..(13): Hydroxyproline
  MOD_RES (15)..(15): 2S, 4S-4-fluoroproline
  MOD_RES (16)..(16): Hydroxyproline
  MOD_RES (18)..(18): 2S, 4S-4-fluoroproline
  MOD_RES (19)..(19): Hydroxyproline
  MOD_RES (21)..(21): 2S, 4S-4-fluoroproline
  MOD_RES (22)..(22): Hydroxyproline
  MOD_RES (24)..(24): 2S, 4S-4-fluoroproline
  MOD_RES (25)..(25): Hydroxyproline
  MOD_RES (27)..(27): 2S, 4S-4-fluoroproline
  MOD_RES (28)..(28): Hydroxyproline
XGPPGPPGPPGPPGPPGPPGPPGPPGPP

SEQ ID NO: 98 - protein, 28 aa, Artificial Sequence
  Description of Artificial Sequence: Synthetic peptide
  MOD_RES (1)..(1): 6-aminohexanoic acid
  MOD_RES (3)..(3): 2S, 4S-4-fluoroproline
  MOD_RES (4)..(4): Hydroxyproline
  MOD_RES (6)..(6): 2S, 4S-4-fluoroproline
  MOD_RES (7)..(7): Hydroxyproline
  MOD_RES (9)..(9): 2S, 4S-4-fluoroproline
  MOD_RES (10)..(10): Hydroxyproline
  MOD_RES (12)..(12): 2S, 4S-4-fluoroproline
  MOD_RES (13)..(13): Hydroxyproline
  MOD_RES (15)..(15): 2S, 4S-4-fluoroproline
  MOD_RES (16)..(16): Hydroxyproline
  MOD_RES (18)..(18): 2S, 4S-4-fluoroproline
  MOD_RES (19)..(19): Hydroxyproline
  MOD_RES (21)..(21): 2S, 4S-4-fluoroproline
  MOD_RES (22)..(22): Hydroxyproline
  MOD_RES (24)..(24): 2S, 4S-4-fluoroproline
  MOD_RES (25)..(25): Hydroxyproline
  MOD_RES (27)..(27): 2S, 4S-4-fluoroproline
  MOD_RES (28)..(28): Hydroxyproline
XGPPGPPGPPGPPGPPGPPGPPGPPGPP

SEQ ID NO: 99 - protein, 28 aa, Artificial Sequence
  Description of Artificial Sequence: Synthetic peptide
  MOD_RES (1)..(1): 6-aminohexanoic acid
  MOD_RES (3)..(3): 2S, 4S-4-fluoroproline
  MOD_RES (4)..(4): Hydroxyproline
  MOD_RES (6)..(6): 2S, 4S-4-fluoroproline
  MOD_RES (7)..(7): Hydroxyproline
  MOD_RES (9)..(9): 2S, 4S-4-fluoroproline
  MOD_RES (10)..(10): Hydroxyproline
  MOD_RES (12)..(12): 2S, 4S-4-fluoroproline
  MOD_RES (13)..(13): Hydroxyproline
  MOD_RES (15)..(15): 2S, 4S-4-fluoroproline
  MOD_RES (16)..(16): Hydroxyproline
  MOD_RES (18)..(18): 2S, 4S-4-fluoroproline
  MOD_RES (19)..(19): Hydroxyproline
  MOD_RES (21)..(21): 2S, 4S-4-fluoroproline
  MOD_RES (22)..(22): Hydroxyproline
  MOD_RES (24)..(24): 2S, 4S-4-fluoroproline
  MOD_RES (25)..(25): Hydroxyproline
  MOD_RES (27)..(27): 2S, 4S-4-fluoroproline
  MOD_RES (28)..(28): Hydroxyproline
XGPPGPPGPPGPPGPPGPPGPPGPPGPP

SEQ ID NO: 100 - protein, 28 aa, Artificial Sequence
  Description of Artificial Sequence: Synthetic peptide
  MOD_RES (1)..(1): 6-aminohexanoic acid
  MOD_RES (3)..(3): 2S, 4S-4-fluoroproline
  MOD_RES (4)..(4): Hydroxyproline
  MOD_RES (6)..(6): 2S, 4S-4-fluoroproline
  MOD_RES (7)..(7): Hydroxyproline
  MOD_RES (9)..(9): 2S, 4S-4-fluoroproline
  MOD_RES (10)..(10): Hydroxyproline
  MOD_RES (12)..(12): 2S, 4S-4-fluoroproline
  MOD_RES (13)..(13): Hydroxyproline
  MOD_RES (15)..(15): 2S, 4S-4-fluoroproline
  MOD_RES (16)..(16): Hydroxyproline
  MOD_RES (18)..(18): 2S, 4S-4-fluoroproline
  MOD_RES (19)..(19): Hydroxyproline
  MOD_RES (21)..(21): 2S, 4S-4-fluoroproline
  MOD_RES (22)..(22): Hydroxyproline
  MOD_RES (24)..(24): 2S, 4S-4-fluoroproline
  MOD_RES (25)..(25): Hydroxyproline
  MOD_RES (27)..(27): 2S, 4S-4-fluoroproline
  MOD_RES (28)..(28): Hydroxyproline
XGPPGPPGPPGPPGPPGPPGPPGPPGPP

SEQ ID NO: 101 - protein, 28 aa, Artificial Sequence
  Description of Artificial Sequence: Synthetic peptide
  MOD_RES (1)..(1): 6-aminohexanoic acid
  MOD_RES (3)..(3): 2S, 4S-4-fluoroproline
  MOD_RES (4)..(4): Hydroxyproline
  MOD_RES (6)..(6): 2S, 4S-4-fluoroproline
  MOD_RES (7)..(7): Hydroxyproline
  MOD_RES (9)..(9): 2S, 4S-4-fluoroproline
  MOD_RES (10)..(10): Hydroxyproline
  MOD_RES (12)..(12): 2S, 4S-4-fluoroproline
  MOD_RES (13)..(13): Hydroxyproline
  MOD_RES (15)..(15): 2S, 4S-4-fluoroproline
  MOD_RES (16)..(16): Hydroxyproline
  MOD_RES (18)..(18): 2S, 4S-4-fluoroproline
  MOD_RES (19)..(19): Hydroxyproline
  MOD_RES (21)..(21): 2S, 4S-4-fluoroproline
  MOD_RES (22)..(22): Hydroxyproline
  MOD_RES (24)..(24): 2S, 4S-4-fluoroproline
  MOD_RES (25)..(25): Hydroxyproline
  MOD_RES (27)..(27): 2S, 4S-4-fluoroproline
  MOD_RES (28)..(28): Hydroxyproline
XGPPGPPGPPGPPGPPGPPGPPGPPGPP

SEQ ID NO: 102 - protein, 28 aa, Artificial Sequence
  Description of Artificial Sequence: Synthetic peptide
  MOD_RES (1)..(1): 6-aminohexanoic acid
  MOD_RES (3)..(3): 2S, 4S-4-fluoroproline
  MOD_RES (4)..(4): Hydroxyproline
  MOD_RES (6)..(6): 2S, 4S-4-fluoroproline
  MOD_RES (7)..(7): Hydroxyproline
  MOD_RES (9)..(9): 2S, 4S-4-fluoroproline
  MOD_RES (10)..(10): Hydroxyproline
  MOD_RES (12)..(12): 2S, 4S-4-fluoroproline
  MOD_RES (13)..(13): Hydroxyproline
  MOD_RES (15)..(15): 2S, 4S-4-fluoroproline
  MOD_RES (16)..(16): Hydroxyproline
  MOD_RES (18)..(18): 2S, 4S-4-fluoroproline
  MOD_RES (19)..(19): Hydroxyproline
  MOD_RES (21)..(21): 2S, 4S-4-fluoroproline
  MOD_RES (22)..(22): Hydroxyproline
  MOD_RES (24)..(24): 2S, 4S-4-fluoroproline
  MOD_RES (25)..(25): Hydroxyproline
  MOD_RES (27)..(27): 2S, 4S-4-fluoroproline
  MOD_RES (28)..(28): Hydroxyproline
XGPPGPPGPPGPPGPPGPPGPPGPPGPP

SEQ ID NO: 103 - protein, 28 aa, Artificial Sequence
  Description of Artificial Sequence: Synthetic peptide
  MOD_RES (1)..(1): 6-aminohexanoic acid
  MOD_RES (3)..(3): 2S, 4S-4-fluoroproline
  MOD_RES (4)..(4): Hydroxyproline
  MOD_RES (6)..(6): 2S, 4S-4-fluoroproline
  MOD_RES (7)..(7): Hydroxyproline
  MOD_RES (9)..(9): 2S, 4S-4-fluoroproline
  MOD_RES (10)..(10): Hydroxyproline
  MOD_RES (12)..(12): 2S, 4S-4-fluoroproline
  MOD_RES (13)..(13): Hydroxyproline
  MOD_RES (15)..(15): 2S, 4S-4-fluoroproline
  MOD_RES (16)..(16): Hydroxyproline
  MOD_RES (18)..(18): 2S, 4S-4-fluoroproline
  MOD_RES (19)..(19): Hydroxyproline
  MOD_RES (21)..(21): 2S, 4S-4-fluoroproline
  MOD_RES (22)..(22): Hydroxyproline
  MOD_RES (24)..(24): 2S, 4S-4-fluoroproline
  MOD_RES (25)..(25): Hydroxyproline
  MOD_RES (27)..(27): 2S, 4S-4-fluoroproline
  MOD_RES (28)..(28): Hydroxyproline
XGPPGPPGPPGPPGPPGPPGPPGPPGPP

SEQ ID NO: 104 - protein, 28 aa, Artificial Sequence
  Description of Artificial Sequence: Synthetic peptide
  MOD_RES (1)..(1): 6-aminohexanoic acid
  MOD_RES (3)..(3): 2S, 4S-4-fluoroproline
  MOD_RES (4)..(4): Hydroxyproline
  MOD_RES (6)..(6): 2S, 4S-4-fluoroproline
  MOD_RES (7)..(7): Hydroxyproline
  MOD_RES (9)..(9): 2S, 4S-4-fluoroproline
  MOD_RES (10)..(10): Hydroxyproline
  MOD_RES (12)..(12): 2S, 4S-4-fluoroproline
  MOD_RES (13)..(13): Hydroxyproline
  MOD_RES (15)..(15): 2S, 4S-4-fluoroproline
  MOD_RES (16)..(16): Hydroxyproline
  MOD_RES (18)..(18): 2S, 4S-4-fluoroproline
  MOD_RES (19)..(19): Hydroxyproline
  MOD_RES (21)..(21): 2S, 4S-4-fluoroproline
  MOD_RES (22)..(22): Hydroxyproline
  MOD_RES (24)..(24): 2S, 4S-4-fluoroproline
  MOD_RES (25)..(25): Hydroxyproline
  MOD_RES (27)..(27): 2S, 4S-4-fluoroproline
  MOD_RES (28)..(28): Hydroxyproline
XGPPGPPGPPGPPGPPGPPGPPGPPGPP

SEQ ID NO: 105 - protein, 28 aa, Artificial Sequence
  Description of Artificial Sequence: Synthetic peptide
  MOD_RES (1)..(1): 6-aminohexanoic acid
  MOD_RES (3)..(3): 2S, 4S-4-fluoroproline
  MOD_RES (4)..(4): Hydroxyproline
  MOD_RES (6)..(6): 2S, 4S-4-fluoroproline
  MOD_RES (7)..(7): Hydroxyproline
  MOD_RES (9)..(9): 2S, 4S-4-fluoroproline
  MOD_RES (10)..(10): Hydroxyproline
  MOD_RES (12)..(12): 2S, 4S-4-fluoroproline
  MOD_RES (13)..(13): Hydroxyproline
  MOD_RES (15)..(15): 2S, 4S-4-fluoroproline
  MOD_RES (16)..(16): Hydroxyproline
  MOD_RES (18)..(18): 2S, 4S-4-fluoroproline
  MOD_RES (19)..(19): Hydroxyproline
  MOD_RES (21)..(21): 2S, 4S-4-fluoroproline
  MOD_RES (22)..(22): Hydroxyproline
  MOD_RES (24)..(24): 2S, 4S-4-fluoroproline
  MOD_RES (25)..(25): Hydroxyproline
  MOD_RES (27)..(27): 2S, 4S-4-fluoroproline
  MOD_RES (28)..(28): Hydroxyproline
XGPPGPPGPPGPPGPPGPPGPPGPPGPP

SEQ ID NO: 106 - protein, 28 aa, Artificial Sequence
  Description of Artificial Sequence: Synthetic peptide
  MOD_RES (1)..(1): 6-aminohexanoic acid
  MOD_RES (3)..(3): 2S, 4S-4-fluoroproline
  MOD_RES (4)..(4): Hydroxyproline
  MOD_RES (6)..(6): 2S, 4S-4-fluoroproline
  MOD_RES (7)..(7): Hydroxyproline
  MOD_RES (9)..(9): 2S, 4S-4-fluoroproline
  MOD_RES (10)..(10): Hydroxyproline
  MOD_RES (12)..(12): 2S, 4S-4-fluoroproline
  MOD_RES (13)..(13): Hydroxyproline
  MOD_RES (15)..(15): 2S, 4S-4-fluoroproline
  MOD_RES (16)..(16): Hydroxyproline
  MOD_RES (18)..(18): 2S, 4S-4-fluoroproline
  MOD_RES (19)..(19): Hydroxyproline
  MOD_RES (21)..(21): 2S, 4S-4-fluoroproline
  MOD_RES (22)..(22): Hydroxyproline
  MOD_RES (24)..(24): 2S, 4S-4-fluoroproline
  MOD_RES (25)..(25): Hydroxyproline
  MOD_RES (27)..(27): 2S, 4S-4-fluoroproline
  MOD_RES (28)..(28): Hydroxyproline
XGPPGPPGPPGPPGPPGPPGPPGPPGPP

SEQ ID NO: 107 - protein, 28 aa, Artificial Sequence
  Description of Artificial Sequence: Synthetic peptide
  MOD_RES (1)..(1): 6-aminohexanoic acid
  MOD_RES (3)..(3): 2S, 4S-4-fluoroproline
  MOD_RES (4)..(4): Hydroxyproline
  MOD_RES (6)..(6): 2S, 4S-4-fluoroproline
  MOD_RES (7)..(7): Hydroxyproline
  MOD_RES (9)..(9): 2S, 4S-4-fluoroproline
  MOD_RES (10)..(10): Hydroxyproline
  MOD_RES (12)..(12): 2S, 4S-4-fluoroproline
  MOD_RES (13)..(13): Hydroxyproline
  MOD_RES (15)..(15): 2S, 4S-4-fluoroproline
  MOD_RES (16)..(16): Hydroxyproline
  MOD_RES (18)..(18): 2S, 4S-4-fluoroproline
  MOD_RES (19)..(19): Hydroxyproline
  MOD_RES (21)..(21): 2S, 4S-4-fluoroproline
  MOD_RES (22)..(22): Hydroxyproline
  MOD_RES (24)..(24): 2S, 4S-4-fluoroproline
  MOD_RES (25)..(25): Hydroxyproline
  MOD_RES (27)..(27): 2S, 4S-4-fluoroproline
  MOD_RES (28)..(28): Hydroxyproline
XGPPGPPGPPGPPGPPGPPGPPGPPGPP

SEQ ID NO: 108 - protein, 28 aa, Artificial Sequence
  Description of Artificial Sequence: Synthetic peptide
  MOD_RES (1)..(1): 6-aminohexanoic acid
  MOD_RES (3)..(3): 2S, 4S-4-fluoroproline
  MOD_RES (4)..(4): Hydroxyproline
  MOD_RES (6)..(6): 2S, 4S-4-fluoroproline
  MOD_RES (7)..(7): Hydroxyproline
  MOD_RES (9)..(9): 2S, 4S-4-fluoroproline
  MOD_RES (10)..(10): Hydroxyproline
  MOD_RES (12)..(12): 2S, 4S-4-fluoroproline
  MOD_RES (13)..(13): Hydroxyproline
  MOD_RES (15)..(15): 2S, 4S-4-fluoroproline
  MOD_RES (16)..(16): Hydroxyproline
  MOD_RES (18)..(18): 2S, 4S-4-fluoroproline
  MOD_RES (19)..(19): Hydroxyproline
  MOD_RES (21)..(21): 2S, 4S-4-fluoroproline
  MOD_RES (22)..(22): Hydroxyproline
  MOD_RES (24)..(24): 2S, 4S-4-fluoroproline
  MOD_RES (25)..(25): Hydroxyproline
  MOD_RES (27)..(27): 2S, 4S-4-fluoroproline
  MOD_RES (28)..(28): Hydroxyproline
XGPPGPPGPPGPPGPPGPPGPPGPPGPP

SEQ ID NO: 109 - protein, 28 aa, Artificial Sequence
  Description of Artificial Sequence: Synthetic peptide
  MOD_RES (1)..(1): 6-aminohexanoic acid
  MOD_RES (3)..(3): 2S, 4S-4-fluoroproline
  MOD_RES (4)..(4): Hydroxyproline
  MOD_RES (6)..(6): 2S, 4S-4-fluoroproline
  MOD_RES (7)..(7): Hydroxyproline
  MOD_RES (9)..(9): 2S, 4S-4-fluoroproline
  MOD_RES (10)..(10): Hydroxyproline
  MOD_RES (12)..(12): 2S, 4S-4-fluoroproline
  MOD_RES (13)..(13): Hydroxyproline
  MOD_RES (15)..(15): 2S, 4S-4-fluoroproline
  MOD_RES (16)..(16): Hydroxyproline
  MOD_RES (18)..(18): 2S, 4S-4-fluoroproline
  MOD_RES (19)..(19): Hydroxyproline
  MOD_RES (21)..(21): 2S, 4S-4-fluoroproline
  MOD_RES (22)..(22): Hydroxyproline
  MOD_RES (24)..(24): 2S, 4S-4-fluoroproline
  MOD_RES (25)..(25): Hydroxyproline
  MOD_RES (27)..(27): 2S, 4S-4-fluoroproline
  MOD_RES (28)..(28): Hydroxyproline
XGPPGPPGPPGPPGPPGPPGPPGPPGPP

SEQ ID NO: 110 - protein, 28 aa, Artificial Sequence
  Description of Artificial Sequence: Synthetic peptide
  MOD_RES (1)..(1): 6-aminohexanoic acid
  MOD_RES (3)..(3): 2S, 4S-4-fluoroproline
  MOD_RES (4)..(4): Hydroxyproline
  MOD_RES (6)..(6): 2S, 4S-4-fluoroproline
  MOD_RES (7)..(7): Hydroxyproline
  MOD_RES (9)..(9): 2S, 4S-4-fluoroproline
  MOD_RES (10)..(10): Hydroxyproline
  MOD_RES (12)..(12): 2S, 4S-4-fluoroproline
  MOD_RES (13)..(13): Hydroxyproline
  MOD_RES (15)..(15): 2S, 4S-4-fluoroproline
  MOD_RES (16)..(16): Hydroxyproline
  MOD_RES (18)..(18): 2S, 4S-4-fluoroproline
  MOD_RES (19)..(19): Hydroxyproline
  MOD_RES (21)..(21): 2S, 4S-4-fluoroproline
  MOD_RES (22)..(22): Hydroxyproline
  MOD_RES (24)..(24): 2S, 4S-4-fluoroproline
  MOD_RES (25)..(25): Hydroxyproline
  MOD_RES (27)..(27): 2S, 4S-4-fluoroproline
  MOD_RES (28)..(28): Hydroxyproline
XGPPGPPGPPGPPGPPGPPGPPGPPGPP

SEQ ID NO: 111 - protein, 28 aa, Artificial Sequence
  Description of Artificial Sequence: Synthetic peptide
  MOD_RES (1)..(1): 6-aminohexanoic acid
  MOD_RES (3)..(3): 2S, 4S-4-fluoroproline
  MOD_RES (4)..(4): Hydroxyproline
  MOD_RES (6)..(6): 2S, 4S-4-fluoroproline
  MOD_RES (7)..(7): Hydroxyproline
  MOD_RES (9)..(9): 2S, 4S-4-fluoroproline
  MOD_RES (10)..(10): Hydroxyproline
  MOD_RES (12)..(12): 2S, 4S-4-fluoroproline
  MOD_RES (13)..(13): Hydroxyproline
  MOD_RES (15)..(15): 2S, 4S-4-fluoroproline
  MOD_RES (16)..(16): Hydroxyproline
  MOD_RES (18)..(18): 2S, 4S-4-fluoroproline
  MOD_RES (19)..(19): Hydroxyproline
  MOD_RES (21)..(21): 2S, 4S-4-fluoroproline
  MOD_RES (22)..(22): Hydroxyproline
  MOD_RES (24)..(24): 2S, 4S-4-fluoroproline
  MOD_RES (25)..(25): Hydroxyproline
  MOD_RES (27)..(27): 2S, 4S-4-fluoroproline
  MOD_RES (28)..(28): Hydroxyproline
XGPPGPPGPPGPPGPPGPPGPPGPPGPP

SEQ ID NO: 112 - protein, 28 aa, Artificial Sequence
  Description of Artificial Sequence: Synthetic peptide
  MOD_RES (1)..(1): 6-aminohexanoic acid
  MOD_RES (3)..(3): 2S, 4S-4-fluoroproline
  MOD_RES (4)..(4): Hydroxyproline
  MOD_RES (6)..(6): 2S, 4S-4-fluoroproline
  MOD_RES (7)..(7): Hydroxyproline
  MOD_RES (9)..(9): 2S, 4S-4-fluoroproline
  MOD_RES (10)..(10): Hydroxyproline
  MOD_RES (12)..(12): 2S, 4S-4-fluoroproline
  MOD_RES (13)..(13): Hydroxyproline
  MOD_RES (15)..(15): 2S, 4S-4-fluoroproline
  MOD_RES (16)..(16): Hydroxyproline
  MOD_RES (18)..(18): 2S, 4S-4-fluoroproline
  MOD_RES (19)..(19): Hydroxyproline
  MOD_RES (21)..(21): 2S, 4S-4-fluoroproline
  MOD_RES (22)..(22): Hydroxyproline
  MOD_RES (24)..(24): 2S, 4S-4-fluoroproline
  MOD_RES (25)..(25): Hydroxyproline
  MOD_RES (27)..(27): 2S, 4S-4-fluoroproline
  MOD_RES (28)..(28): Hydroxyproline
XGPPGPPGPPGPPGPPGPPGPPGPPGPP

SEQ ID NO: 113 - protein, 28 aa, Artificial Sequence
  Description of Artificial Sequence: Synthetic peptide
  MOD_RES (1)..(1): 6-aminohexanoic acid
  MOD_RES (3)..(3): 2S, 4S-4-chloroproline
  MOD_RES (4)..(4): Hydroxyproline
  MOD_RES (6)..(6): 2S, 4S-4-chloroproline
  MOD_RES (7)..(7): Hydroxyproline
  MOD_RES (9)..(9): 2S, 4S-4-chloroproline
  MOD_RES (10)..(10): Hydroxyproline
  MOD_RES (12)..(12): 2S, 4S-4-chloroproline
  MOD_RES (13)..(13): Hydroxyproline
  MOD_RES (15)..(15): 2S, 4S-4-chloroproline
  MOD_RES (16)..(16): Hydroxyproline
  MOD_RES (18)..(18): 2S, 4S-4-chloroproline
  MOD_RES (19)..(19): Hydroxyproline
  MOD_RES (21)..(21): 2S, 4S-4-chloroproline
  MOD_RES (22)..(22): Hydroxyproline
  MOD_RES (24)..(24): 2S, 4S-4-chloroproline
  MOD_RES (25)..(25): Hydroxyproline
  MOD_RES (27)..(27): 2S, 4S-4-chloroproline
  MOD_RES (28)..(28): Hydroxyproline
XGPPGPPGPPGPPGPPGPPGPPGPPGPP

SEQ ID NO: 114 - protein, 28 aa, Artificial Sequence
  Description of Artificial Sequence: Synthetic peptide
  MOD_RES (1)..(1): 6-aminohexanoic acid
  MOD_RES (3)..(3): 2S, 4S-4-chloroproline
  MOD_RES (4)..(4): Hydroxyproline
  MOD_RES (6)..(6): 2S, 4S-4-chloroproline
  MOD_RES (7)..(7): Hydroxyproline
  MOD_RES (9)..(9): 2S, 4S-4-chloroproline
  MOD_RES (10)..(10): Hydroxyproline
  MOD_RES (12)..(12): 2S, 4S-4-chloroproline
  MOD_RES (13)..(13): Hydroxyproline
  MOD_RES (15)..(15): 2S, 4S-4-chloroproline
  MOD_RES (16)..(16): Hydroxyproline
  MOD_RES (18)..(18): 2S, 4S-4-chloroproline
  MOD_RES (19)..(19): Hydroxyproline
  MOD_RES (21)..(21): 2S, 4S-4-chloroproline
  MOD_RES (22)..(22): Hydroxyproline
  MOD_RES (24)..(24): 2S, 4S-4-chloroproline
  MOD_RES (25)..(25): Hydroxyproline
  MOD_RES (27)..(27): 2S, 4S-4-chloroproline
  MOD_RES (28)..(28): Hydroxyproline
XGPPGPPGPPGPPGPPGPPGPPGPPGPP

SEQ ID NO: 115 - protein, 28 aa, Artificial Sequence
  Description of Artificial Sequence: Synthetic peptide
  MOD_RES (1)..(1): 6-aminohexanoic acid
  MOD_RES (3)..(3): 2S, 4S-4-chloroproline
  MOD_RES (4)..(4): Hydroxyproline
  MOD_RES (6)..(6): 2S, 4S-4-chloroproline
  MOD_RES (7)..(7): Hydroxyproline
  MOD_RES (9)..(9): 2S, 4S-4-chloroproline
  MOD_RES (10)..(10): Hydroxyproline
  MOD_RES (12)..(12): 2S, 4S-4-chloroproline
  MOD_RES (13)..(13): Hydroxyproline
  MOD_RES (15)..(15): 2S, 4S-4-chloroproline
  MOD_RES (16)..(16): Hydroxyproline
  MOD_RES (18)..(18): 2S, 4S-4-chloroproline
  MOD_RES (19)..(19): Hydroxyproline
  MOD_RES (21)..(21): 2S, 4S-4-chloroproline
  MOD_RES (22)..(22): Hydroxyproline
  MOD_RES (24)..(24): 2S, 4S-4-chloroproline
  MOD_RES (25)..(25): Hydroxyproline
  MOD_RES (27)..(27): 2S, 4S-4-chloroproline
  MOD_RES (28)..(28): Hydroxyproline
XGPPGPPGPPGPPGPPGPPGPPGPPGPP

SEQ ID NO: 116 - protein, 28 aa, Artificial Sequence
  Description of Artificial Sequence: Synthetic peptide
  MOD_RES (1)..(1): 6-aminohexanoic acid
  MOD_RES (3)..(3): 2S, 4S-4-chloroproline
  MOD_RES (4)..(4): Hydroxyproline
  MOD_RES (6)..(6): 2S, 4S-4-chloroproline
  MOD_RES (7)..(7): Hydroxyproline
  MOD_RES (9)..(9): 2S, 4S-4-chloroproline
  MOD_RES (10)..(10): Hydroxyproline
  MOD_RES (12)..(12): 2S, 4S-4-chloroproline
  MOD_RES (13)..(13): Hydroxyproline
  MOD_RES (15)..(15): 2S, 4S-4-chloroproline
  MOD_RES (16)..(16): Hydroxyproline
  MOD_RES (18)..(18): 2S, 4S-4-chloroproline
  MOD_RES (19)..(19): Hydroxyproline
  MOD_RES (21)..(21): 2S, 4S-4-chloroproline
  MOD_RES (22)..(22): Hydroxyproline
  MOD_RES (24)..(24): 2S, 4S-4-chloroproline
  MOD_RES (25)..(25): Hydroxyproline
  MOD_RES (27)..(27): 2S, 4S-4-chloroproline
  MOD_RES (28)..(28): Hydroxyproline
XGPPGPPGPPGPPGPPGPPGPPGPPGPP

SEQ ID NO: 117 - protein, 28 aa, Artificial Sequence
  Description of Artificial Sequence: Synthetic peptide
  MOD_RES (1)..(1): 6-aminohexanoic acid
  MOD_RES (3)..(3): 2S, 4S-4-chloroproline
  MOD_RES (4)..(4): Hydroxyproline
  MOD_RES (6)..(6): 2S, 4S-4-chloroproline
  MOD_RES (7)..(7): Hydroxyproline
  MOD_RES (9)..(9): 2S, 4S-4-chloroproline
  MOD_RES (10)..(10): Hydroxyproline
  MOD_RES (12)..(12): 2S, 4S-4-chloroproline
  MOD_RES (13)..(13): Hydroxyproline
  MOD_RES (15)..(15): 2S, 4S-4-chloroproline
  MOD_RES (16)..(16): Hydroxyproline
  MOD_RES (18)..(18): 2S, 4S-4-chloroproline
  MOD_RES (19)..(19): Hydroxyproline
  MOD_RES (21)..(21): 2S, 4S-4-chloroproline
  MOD_RES (22)..(22): Hydroxyproline
  MOD_RES (24)..(24): 2S, 4S-4-chloroproline
  MOD_RES (25)..(25): Hydroxyproline
  MOD_RES (27)..(27): 2S, 4S-4-chloroproline
  MOD_RES (28)..(28): Hydroxyproline
XGPPGPPGPPGPPGPPGPPGPPGPPGPP

SEQ ID NO: 118 - protein, 28 aa, Artificial Sequence
  Description of Artificial Sequence: Synthetic peptide
  MOD_RES (1)..(1): 6-aminohexanoic acid
  MOD_RES (3)..(3): 2S, 4S-4-chloroproline
  MOD_RES (4)..(4): Hydroxyproline
  MOD_RES (6)..(6): 2S, 4S-4-chloroproline
  MOD_RES (7)..(7): Hydroxyproline
  MOD_RES (9)..(9): 2S, 4S-4-chloroproline
  MOD_RES (10)..(10): Hydroxyproline
  MOD_RES (12)..(12): 2S, 4S-4-chloroproline
  MOD_RES (13)..(13): Hydroxyproline
  MOD_RES (15)..(15): 2S, 4S-4-chloroproline
  MOD_RES (16)..(16): Hydroxyproline
  MOD_RES (18)..(18): 2S, 4S-4-chloroproline
  MOD_RES (19)..(19): Hydroxyproline
  MOD_RES (21)..(21): 2S, 4S-4-chloroproline
  MOD_RES (22)..(22): Hydroxyproline
  MOD_RES (24)..(24): 2S, 4S-4-chloroproline
  MOD_RES (25)..(25): Hydroxyproline
  MOD_RES (27)..(27): 2S, 4S-4-chloroproline
  MOD_RES (28)..(28): Hydroxyproline
XGPPGPPGPPGPPGPPGPPGPPGPPGPP

SEQ ID NO: 119 - protein, 28 aa, Artificial Sequence
  Description of Artificial Sequence: Synthetic peptide
  MOD_RES (1)..(1): 6-aminohexanoic acid
  MOD_RES (3)..(3): 2S, 4S-4-chloroproline
  MOD_RES (4)..(4): Hydroxyproline
  MOD_RES (6)..(6): 2S, 4S-4-chloroproline
  MOD_RES (7)..(7): Hydroxyproline
  MOD_RES (9)..(9): 2S, 4S-4-chloroproline
  MOD_RES (10)..(10): Hydroxyproline
  MOD_RES (12)..(12): 2S, 4S-4-chloroproline
  MOD_RES (13)..(13): Hydroxyproline
  MOD_RES (15)..(15): 2S, 4S-4-chloroproline
  MOD_RES (16)..(16): Hydroxyproline
  MOD_RES (18)..(18): 2S, 4S-4-chloroproline
  MOD_RES (19)..(19): Hydroxyproline
  MOD_RES (21)..(21): 2S, 4S-4-chloroproline
  MOD_RES (22)..(22): Hydroxyproline
  MOD_RES (24)..(24): 2S, 4S-4-chloroproline
  MOD_RES (25)..(25): Hydroxyproline
  MOD_RES (27)..(27): 2S, 4S-4-chloroproline
  MOD_RES (28)..(28): Hydroxyproline
XGPPGPPGPPGPPGPPGPPGPPGPPGPP

SEQ ID NO: 120 - protein, 28 aa, Artificial Sequence
  Description of Artificial Sequence: Synthetic peptide
  MOD_RES (1)..(1): 6-aminohexanoic acid
  MOD_RES (3)..(3): 2S, 4S-4-chloroproline
  MOD_RES (4)..(4): Hydroxyproline
  MOD_RES (6)..(6): 2S, 4S-4-chloroproline
  MOD_RES (7)..(7): Hydroxyproline
  MOD_RES (9)..(9): 2S, 4S-4-chloroproline
  MOD_RES (10)..(10): Hydroxyproline
  MOD_RES (12)..(12): 2S, 4S-4-chloroproline
  MOD_RES (13)..(13): Hydroxyproline
  MOD_RES (15)..(15): 2S, 4S-4-chloroproline
  MOD_RES (16)..(16): Hydroxyproline
  MOD_RES (18)..(18): 2S, 4S-4-chloroproline
  MOD_RES (19)..(19): Hydroxyproline
  MOD_RES (21)..(21): 2S, 4S-4-chloroproline
  MOD_RES (22)..(22): Hydroxyproline
  MOD_RES (24)..(24): 2S, 4S-4-chloroproline
  MOD_RES (25)..(25): Hydroxyproline
  MOD_RES (27)..(27): 2S, 4S-4-chloroproline
  MOD_RES (28)..(28): Hydroxyproline
XGPPGPPGPPGPPGPPGPPGPPGPPGPP

SEQ ID NO: 121 - protein, 28 aa, Artificial Sequence
  Description of Artificial Sequence: Synthetic peptide
  MOD_RES (1)..(1): 6-aminohexanoic acid
  MOD_RES (3)..(3): 2S, 4S-4-chloroproline
  MOD_RES (4)..(4): Hydroxyproline
  MOD_RES (6)..(6): 2S, 4S-4-chloroproline
  MOD_RES (7)..(7): Hydroxyproline
  MOD_RES (9)..(9): 2S, 4S-4-chloroproline
  MOD_RES (10)..(10): Hydroxyproline
  MOD_RES (12)..(12): 2S, 4S-4-chloroproline
  MOD_RES (13)..(13): Hydroxyproline
  MOD_RES (15)..(15): 2S, 4S-4-chloroproline
  MOD_RES (16)..(16): Hydroxyproline
  MOD_RES (18)..(18): 2S, 4S-4-chloroproline
  MOD_RES (19)..(19): Hydroxyproline
  MOD_RES (21)..(21): 2S, 4S-4-chloroproline
  MOD_RES (22)..(22): Hydroxyproline
  MOD_RES (24)..(24): 2S, 4S-4-chloroproline
  MOD_RES (25)..(25): Hydroxyproline
  MOD_RES (27)..(27): 2S, 4S-4-chloroproline
  MOD_RES (28)..(28): Hydroxyproline
XGPPGPPGPPGPPGPPGPPGPPGPPGPP

SEQ ID NO: 122 - protein, 28 aa, Artificial Sequence
  Description of Artificial Sequence: Synthetic peptide
  MOD_RES (1)..(1): 6-aminohexanoic acid
  MOD_RES (3)..(3): 2S, 4S-4-chloroproline
  MOD_RES (4)..(4): Hydroxyproline
  MOD_RES (6)..(6): 2S, 4S-4-chloroproline
  MOD_RES (7)..(7): Hydroxyproline
  MOD_RES (9)..(9): 2S, 4S-4-chloroproline
  MOD_RES (10)..(10): Hydroxyproline
  MOD_RES (12)..(12): 2S, 4S-4-chloroproline
  MOD_RES (13)..(13): Hydroxyproline
  MOD_RES (15)..(15): 2S, 4S-4-chloroproline
  MOD_RES (16)..(16): Hydroxyproline
  MOD_RES (18)..(18): 2S, 4S-4-chloroproline
  MOD_RES (19)..(19): Hydroxyproline
  MOD_RES (21)..(21): 2S, 4S-4-chloroproline
  MOD_RES (22)..(22): Hydroxyproline
  MOD_RES (24)..(24): 2S, 4S-4-chloroproline
  MOD_RES (25)..(25): Hydroxyproline
  MOD_RES (27)..(27): 2S, 4S-4-chloroproline
  MOD_RES (28)..(28): Hydroxyproline
XGPPGPPGPPGPPGPPGPPGPPGPPGPP

SEQ ID NO: 123 - protein, 28 aa, Artificial Sequence
  Description of Artificial Sequence: Synthetic peptide
  MOD_RES (1)..(1): 6-aminohexanoic acid
  MOD_RES (3)..(3): 2S, 4S-4-chloroproline
  MOD_RES (4)..(4): Hydroxyproline
  MOD_RES (6)..(6): 2S, 4S-4-chloroproline
  MOD_RES (7)..(7): Hydroxyproline
  MOD_RES (9)..(9): 2S, 4S-4-chloroproline
  MOD_RES (10)..(10): Hydroxyproline
  MOD_RES (12)..(12): 2S, 4S-4-chloroproline
  MOD_RES (13)..(13): Hydroxyproline
  MOD_RES (15)..(15): 2S, 4S-4-chloroproline
  MOD_RES (16)..(16): Hydroxyproline
  MOD_RES (18)..(18): 2S, 4S-4-chloroproline
  MOD_RES (19)..(19): Hydroxyproline
  MOD_RES (21)..(21): 2S, 4S-4-chloroproline
  MOD_RES (22)..(22): Hydroxyproline
  MOD_RES (24)..(24): 2S, 4S-4-chloroproline
  MOD_RES (25)..(25): Hydroxyproline
  MOD_RES (27)..(27): 2S, 4S-4-chloroproline
  MOD_RES (28)..(28): Hydroxyproline
XGPPGPPGPPGPPGPPGPPGPPGPPGPP

SEQ ID NO: 124 - protein, 28 aa, Artificial Sequence
  Description of Artificial Sequence: Synthetic peptide
  MOD_RES (1)..(1): 6-aminohexanoic acid
  MOD_RES (3)..(3): 2S, 4S-4-chloroproline
  MOD_RES (4)..(4): Hydroxyproline
  MOD_RES (6)..(6): 2S, 4S-4-chloroproline
  MOD_RES (7)..(7): Hydroxyproline
  MOD_RES (9)..(9): 2S, 4S-4-chloroproline
  MOD_RES (10)..(10): Hydroxyproline
  MOD_RES (12)..(12): 2S, 4S-4-chloroproline
  MOD_RES (13)..(13): Hydroxyproline
  MOD_RES (15)..(15): 2S, 4S-4-chloroproline
  MOD_RES (16)..(16): Hydroxyproline
  MOD_RES (18)..(18): 2S, 4S-4-chloroproline
  MOD_RES (19)..(19): Hydroxyproline
  MOD_RES (21)..(21): 2S, 4S-4-chloroproline
  MOD_RES (22)..(22): Hydroxyproline
  MOD_RES (24)..(24): 2S, 4S-4-chloroproline
  MOD_RES (25)..(25): Hydroxyproline
  MOD_RES (27)..(27): 2S, 4S-4-chloroproline
  MOD_RES (28)..(28): Hydroxyproline
XGPPGPPGPPGPPGPPGPPGPPGPPGPP

SEQ ID NO: 125 - protein, 28 aa, Artificial Sequence
  Description of Artificial Sequence: Synthetic peptide
  MOD_RES (1)..(1): 6-aminohexanoic acid
  MOD_RES (3)..(3): 2S, 4S-4-chloroproline
  MOD_RES (4)..(4): Hydroxyproline
  MOD_RES (6)..(6): 2S, 4S-4-chloroproline
  MOD_RES (7)..(7): Hydroxyproline
  MOD_RES (9)..(9): 2S, 4S-4-chloroproline
  MOD_RES (10)..(10): Hydroxyproline
  MOD_RES (12)..(12): 2S, 4S-4-chloroproline
  MOD_RES (13)..(13): Hydroxyproline
  MOD_RES (15)..(15): 2S, 4S-4-chloroproline
  MOD_RES (16)..(16): Hydroxyproline
  MOD_RES (18)..(18): 2S, 4S-4-chloroproline
  MOD_RES (19)..(19): Hydroxyproline
  MOD_RES (21)..(21): 2S, 4S-4-chloroproline
  MOD_RES (22)..(22): Hydroxyproline
  MOD_RES (24)..(24): 2S, 4S-4-chloroproline
  MOD_RES (25)..(25): Hydroxyproline
  MOD_RES (27)..(27): 2S, 4S-4-chloroproline
  MOD_RES (28)..(28): Hydroxyproline
XGPPGPPGPPGPPGPPGPPGPPGPPGPP

SEQ ID NO: 126 - protein, 28 aa, Artificial Sequence
  Description of Artificial Sequence: Synthetic peptide
  MOD_RES (1)..(1): 6-aminohexanoic acid
  MOD_RES (3)..(3): 2S, 4S-4-chloroproline
  MOD_RES (4)..(4): Hydroxyproline
  MOD_RES (6)..(6): 2S, 4S-4-chloroproline
  MOD_RES (7)..(7): Hydroxyproline
  MOD_RES (9)..(9): 2S, 4S-4-chloroproline
  MOD_RES (10)..(10): Hydroxyproline
  MOD_RES (12)..(12): 2S, 4S-4-chloroproline
  MOD_RES (13)..(13): Hydroxyproline
  MOD_RES (15)..(15): 2S, 4S-4-chloroproline
  MOD_RES (16)..(16): Hydroxyproline
  MOD_RES (18)..(18): 2S, 4S-4-chloroproline
  MOD_RES (19)..(19): Hydroxyproline
  MOD_RES (21)..(21): 2S, 4S-4-chloroproline
  MOD_RES (22)..(22): Hydroxyproline
  MOD_RES (24)..(24): 2S, 4S-4-chloroproline
  MOD_RES (25)..(25): Hydroxyproline
  MOD_RES (27)..(27): 2S, 4S-4-chloroproline
  MOD_RES (28)..(28): Hydroxyproline
XGPPGPPGPPGPPGPPGPPGPPGPPGPP

SEQ ID NO: 127 - protein, 28 aa, Artificial Sequence
  Description of Artificial Sequence: Synthetic peptide
  MOD_RES (1)..(1): 6-aminohexanoic acid
  MOD_RES (3)..(3): 2S, 4S-4-chloroproline
  MOD_RES (4)..(4): Hydroxyproline
  MOD_RES (6)..(6): 2S, 4S-4-chloroproline
  MOD_RES (7)..(7): Hydroxyproline
  MOD_RES (9)..(9): 2S, 4S-4-chloroproline
  MOD_RES (10)..(10): Hydroxyproline
  MOD_RES (12)..(12): 2S, 4S-4-chloroproline
  MOD_RES (13)..(13): Hydroxyproline
  MOD_RES (15)..(15): 2S, 4S-4-chloroproline
  MOD_RES (16)..(16): Hydroxyproline
  MOD_RES (18)..(18): 2S, 4S-4-chloroproline
  MOD_RES (19)..(19): Hydroxyproline
  MOD_RES (21)..(21): 2S, 4S-4-chloroproline
  MOD_RES (22)..(22): Hydroxyproline
  MOD_RES (24)..(24): 2S, 4S-4-chloroproline
  MOD_RES (25)..(25): Hydroxyproline
  MOD_RES (27)..(27): 2S, 4S-4-chloroproline
  MOD_RES (28)..(28): Hydroxyproline
XGPPGPPGPPGPPGPPGPPGPPGPPGPP

SEQ ID NO: 128 - protein, 28 aa, Artificial Sequence
  Description of Artificial Sequence: Synthetic peptide
  MOD_RES (1)..(1): 6-aminohexanoic acid
  MOD_RES (3)..(3): 2S, 4S-4-chloroproline
  MOD_RES (4)..(4): Hydroxyproline
  MOD_RES (6)..(6): 2S, 4S-4-chloroproline
  MOD_RES (7)..(7): Hydroxyproline
  MOD_RES (9)..(9): 2S, 4S-4-chloroproline
  MOD_RES (10)..(10): Hydroxyproline
  MOD_RES (12)..(12): 2S, 4S-4-chloroproline
  MOD_RES (13)..(13): Hydroxyproline
  MOD_RES (15)..(15): 2S, 4S-4-chloroproline
  MOD_RES (16)..(16): Hydroxyproline
  MOD_RES (18)..(18): 2S, 4S-4-chloroproline
  MOD_RES (19)..(19): Hydroxyproline
  MOD_RES (21)..(21): 2S, 4S-4-chloroproline
  MOD_RES (22)..(22): Hydroxyproline
  MOD_RES (24)..(24): 2S, 4S-4-chloroproline
  MOD_RES (25)..(25): Hydroxyproline
  MOD_RES (27)..(27): 2S, 4S-4-chloroproline
  MOD_RES (28)..(28): Hydroxyproline
XGPPGPPGPPGPPGPPGPPGPPGPPGPP

SEQ ID NO: 129 - protein, 28 aa, Artificial Sequence
  Description of Artificial Sequence: Synthetic peptide
  MOD_RES (1)..(1): 6-aminohexanoic acid
  MOD_RES (3)..(3): 2S, 4S-4-chloroproline
  MOD_RES (4)..(4): Hydroxyproline
  MOD_RES (6)..(6): 2S, 4S-4-chloroproline
  MOD_RES (7)..(7): Hydroxyproline
  MOD_RES (9)..(9): 2S, 4S-4-chloroproline
  MOD_RES (10)..(10): Hydroxyproline
  MOD_RES (12)..(12): 2S, 4S-4-chloroproline
  MOD_RES (13)..(13): Hydroxyproline
  MOD_RES (15)..(15): 2S, 4S-4-chloroproline
  MOD_RES (16)..(16): Hydroxyproline
  MOD_RES (18)..(18): 2S, 4S-4-chloroproline
  MOD_RES (19)..(19): Hydroxyproline
  MOD_RES (21)..(21): 2S, 4S-4-chloroproline
  MOD_RES (22)..(22): Hydroxyproline
  MOD_RES (24)..(24): 2S, 4S-4-chloroproline
  MOD_RES (25)..(25): Hydroxyproline
  MOD_RES (27)..(27): 2S, 4S-4-chloroproline
  MOD_RES (28)..(28): Hydroxyproline
XGPPGPPGPPGPPGPPGPPGPPGPPGPP

SEQ ID NO: 130 - protein, 28 aa, Artificial Sequence
  Description of Artificial Sequence: Synthetic peptide
  MOD_RES (1)..(1): 6-aminohexanoic acid
  MOD_RES (3)..(3): 2S, 4S-4-chloroproline
  MOD_RES (4)..(4): Hydroxyproline
  MOD_RES (6)..(6): 2S, 4S-4-chloroproline
  MOD_RES (7)..(7): Hydroxyproline
  MOD_RES (9)..(9): 2S, 4S-4-chloroproline
  MOD_RES (10)..(10): Hydroxyproline
  MOD_RES (12)..(12): 2S, 4S-4-chloroproline
  MOD_RES (13)..(13): Hydroxyproline
  MOD_RES (15)..(15): 2S, 4S-4-chloroproline
  MOD_RES (16)..(16): Hydroxyproline
  MOD_RES (18)..(18): 2S, 4S-4-chloroproline
  MOD_RES (19)..(19): Hydroxyproline
  MOD_RES (21)..(21): 2S, 4S-4-chloroproline
  MOD_RES (22)..(22): Hydroxyproline
  MOD_RES (24)..(24): 2S, 4S-4-chloroproline
  MOD_RES (25)..(25): Hydroxyproline
  MOD_RES (27)..(27): 2S, 4S-4-chloroproline
  MOD_RES (28)..(28): Hydroxyproline
XGPPGPPGPPGPPGPPGPPGPPGPPGPP

SEQ ID NO: 131 - protein, 28 aa, Artificial Sequence
  Description of Artificial Sequence: Synthetic peptide
  MOD_RES (1)..(1): 6-aminohexanoic acid
  MOD_RES (3)..(3): 2S, 4S-4-chloroproline
  MOD_RES (4)..(4): Hydroxyproline
  MOD_RES (6)..(6): 2S, 4S-4-chloroproline
  MOD_RES (7)..(7): Hydroxyproline
  MOD_RES (9)..(9): 2S, 4S-4-chloroproline
  MOD_RES (10)..(10): Hydroxyproline
  MOD_RES (12)..(12): 2S, 4S-4-chloroproline
  MOD_RES (13)..(13): Hydroxyproline
  MOD_RES (15)..(15): 2S, 4S-4-chloroproline
  MOD_RES (16)..(16): Hydroxyproline
  MOD_RES (18)..(18): 2S, 4S-4-chloroproline
  MOD_RES (19)..(19): Hydroxyproline
  MOD_RES (21)..(21): 2S, 4S-4-chloroproline
  MOD_RES (22)..(22): Hydroxyproline
  MOD_RES (24)..(24): 2S, 4S-4-chloroproline
  MOD_RES (25)..(25): Hydroxyproline
  MOD_RES (27)..(27): 2S, 4S-4-chloroproline
  MOD_RES (28)..(28): Hydroxyproline
XGPPGPPGPPGPPGPPGPPGPPGPPGPP

SEQ ID NO: 132 - protein, 28 aa, Artificial Sequence
  Description of Artificial Sequence: Synthetic peptide
  MOD_RES (1)..(1): 6-aminohexanoic acid
  MOD_RES (3)..(3): 2S, 4S-4-chloroproline
  MOD_RES (4)..(4): Hydroxyproline
  MOD_RES (6)..(6): 2S, 4S-4-chloroproline
  MOD_RES (7)..(7): Hydroxyproline
  MOD_RES (9)..(9): 2S, 4S-4-chloroproline
  MOD_RES (10)..(10): Hydroxyproline
  MOD_RES (12)..(12): 2S, 4S-4-chloroproline
  MOD_RES (13)..(13): Hydroxyproline
  MOD_RES (15)..(15): 2S, 4S-4-chloroproline
  MOD_RES (16)..(16): Hydroxyproline
  MOD_RES (18)..(18): 2S, 4S-4-chloroproline
  MOD_RES (19)..(19): Hydroxyproline
  MOD_RES (21)..(21): 2S, 4S-4-chloroproline
  MOD_RES (22)..(22): Hydroxyproline
  MOD_RES (24)..(24): 2S, 4S-4-chloroproline
  MOD_RES (25)..(25): Hydroxyproline
  MOD_RES (27)..(27): 2S, 4S-4-chloroproline
  MOD_RES (28)..(28): Hydroxyproline
XGPPGPPGPPGPPGPPGPPGPPGPPGPP

SEQ ID NO: 133 - skipped

SEQ ID NO: 134 - protein, 28 aa, Artificial Sequence
  Description of Artificial Sequence: Synthetic peptide
  MOD_RES (1)..(1): 6-aminohexanoic acid
  MOD_RES (3)..(3): 2S, 4S-4-chloroproline
  MOD_RES (4)..(4): Hydroxyproline
  MOD_RES (6)..(6): 2S, 4S-4-chloroproline
  MOD_RES (7)..(7): Hydroxyproline
  MOD_RES (9)..(9): 2S, 4S-4-chloroproline
  MOD_RES (10)..(10): Hydroxyproline
  MOD_RES (12)..(12): 2S, 4S-4-chloroproline
  MOD_RES (13)..(13): Hydroxyproline
  MOD_RES (15)..(15): 2S, 4S-4-chloroproline
  MOD_RES (16)..(16): Hydroxyproline
  MOD_RES (18)..(18): 2S, 4S-4-chloroproline
  MOD_RES (19)..(19): Hydroxyproline
  MOD_RES (21)..(21): 2S, 4S-4-chloroproline
  MOD_RES (22)..(22): Hydroxyproline
  MOD_RES (24)..(24): 2S, 4S-4-chloroproline
  MOD_RES (25)..(25): Hydroxyproline
  MOD_RES (27)..(27): 2S, 4S-4-chloroproline
  MOD_RES (28)..(28): Hydroxyproline
XGPPGPPGPPGPPGPPGPPGPPGPPGPP

SEQ ID NO: 135 - protein, 28 aa, Artificial Sequence
  Description of Artificial Sequence: Synthetic peptide
  MOD_RES (1)..(1): 6-aminohexanoic acid
  MOD_RES (3)..(3): 2S, 4S-4-chloroproline
  MOD_RES (4)..(4): Hydroxyproline
  MOD_RES (6)..(6): 2S, 4S-4-chloroproline
  MOD_RES (7)..(7): Hydroxyproline
  MOD_RES (9)..(9): 2S, 4S-4-chloroproline
  MOD_RES (10)..(10): Hydroxyproline
  MOD_RES (12)..(12): 2S, 4S-4-chloroproline
  MOD_RES (13)..(13): Hydroxyproline
  MOD_RES (15)..(15): 2S, 4S-4-chloroproline
  MOD_RES (16)..(16): Hydroxyproline
  MOD_RES (18)..(18): 2S, 4S-4-chloroproline
  MOD_RES (19)..(19): Hydroxyproline
  MOD_RES (21)..(21): 2S, 4S-4-chloroproline
  MOD_RES (22)..(22): Hydroxyproline
  MOD_RES (24)..(24): 2S, 4S-4-chloroproline
  MOD_RES (25)..(25): Hydroxyproline
  MOD_RES (27)..(27): 2S, 4S-4-chloroproline
  MOD_RES (28)..(28): Hydroxyproline
XGPPGPPGPPGPPGPPGPPGPPGPPGPP

SEQ ID NO: 136 - protein, 28 aa, Artificial Sequence
  Description of Artificial Sequence: Synthetic peptide
  MOD_RES (1)..(1): 6-aminohexanoic acid
  MOD_RES (3)..(3): 2S, 4S-4-chloroproline
  MOD_RES (4)..(4): Hydroxyproline
  MOD_RES (6)..(6): 2S, 4S-4-chloroproline
  MOD_RES (7)..(7): Hydroxyproline
  MOD_RES (9)..(9): 2S, 4S-4-chloroproline
  MOD_RES (10)..(10): Hydroxyproline
  MOD_RES (12)..(12): 2S, 4S-4-chloroproline
  MOD_RES (13)..(13): Hydroxyproline
  MOD_RES (15)..(15): 2S, 4S-4-chloroproline
  MOD_RES (16)..(16): Hydroxyproline
  MOD_RES (18)..(18): 2S, 4S-4-chloroproline
  MOD_RES (19)..(19): Hydroxyproline
  MOD_RES (21)..(21): 2S, 4S-4-chloroproline
  MOD_RES (22)..(22): Hydroxyproline
  MOD_RES (24)..(24): 2S, 4S-4-chloroproline
  MOD_RES (25)..(25): Hydroxyproline
  MOD_RES (27)..(27): 2S, 4S-4-chloroproline
  MOD_RES (28)..(28): Hydroxyproline
XGPPGPPGPPGPPGPPGPPGPPGPPGPP

SEQ ID NO: 137 - protein, 28 aa, Artificial Sequence
  Description of Artificial Sequence: Synthetic peptide
  MOD_RES (1)..(1): 6-aminohexanoic acid
  MOD_RES (3)..(3): 2S, 4S-4-chloroproline
  MOD_RES (4)..(4): Hydroxyproline
  MOD_RES (6)..(6): 2S, 4S-4-chloroproline
  MOD_RES (7)..(7): Hydroxyproline
  MOD_RES (9)..(9): 2S, 4S-4-chloroproline
  MOD_RES (10)..(10): Hydroxyproline
  MOD_RES (12)..(12): 2S, 4S-4-chloroproline
  MOD_RES (13)..(13): Hydroxyproline
  MOD_RES (15)..(15): 2S, 4S-4-chloroproline
  MOD_RES (16)..(16): Hydroxyproline
  MOD_RES (18)..(18): 2S, 4S-4-chloroproline
  MOD_RES (19)..(19): Hydroxyproline
  MOD_RES (21)..(21): 2S, 4S-4-chloroproline
  MOD_RES (22)..(22): Hydroxyproline
  MOD_RES (24)..(24): 2S, 4S-4-chloroproline
  MOD_RES (25)..(25): Hydroxyproline
  MOD_RES (27)..(27): 2S, 4S-4-chloroproline
  MOD_RES (28)..(28): Hydroxyproline
XGPPGPPGPPGPPGPPGPPGPPGPPGPP

SEQ ID NO: 138 - protein, 28 aa, Artificial Sequence
  Description of Artificial Sequence: Synthetic peptide
  MOD_RES (1)..(1): 6-aminohexanoic acid
  MOD_RES (3)..(3): 2S, 4S-4-chloroproline
  MOD_RES (4)..(4): Hydroxyproline
  MOD_RES (6)..(6): 2S, 4S-4-chloroproline
  MOD_RES (7)..(7): Hydroxyproline
  MOD_RES (9)..(9): 2S, 4S-4-chloroproline
  MOD_RES (10)..(10): Hydroxyproline
  MOD_RES (12)..(12): 2S, 4S-4-chloroproline
  MOD_RES (13)..(13): Hydroxyproline
  MOD_RES (15)..(15): 2S, 4S-4-chloroproline
  MOD_RES (16)..(16): Hydroxyproline
  MOD_RES (18)..(18): 2S, 4S-4-chloroproline
  MOD_RES (19)..(19): Hydroxyproline
  MOD_RES (21)..(21): 2S, 4S-4-chloroproline
  MOD_RES (22)..(22): Hydroxyproline
  MOD_RES (24)..(24): 2S, 4S-4-chloroproline
  MOD_RES (25)..(25): Hydroxyproline
  MOD_RES (27)..(27): 2S, 4S-4-chloroproline
  MOD_RES (28)..(28): Hydroxyproline
XGPPGPPGPPGPPGPPGPPGPPGPPGPP

SEQ ID NO: 139 - protein, 28 aa, Artificial Sequence
  Description of Artificial Sequence: Synthetic peptide
  MOD_RES (1)..(1): 6-aminohexanoic acid
  MOD_RES (3)..(3): 2S, 4S-4-chloroproline
  MOD_RES (4)..(4): Hydroxyproline
  MOD_RES (6)..(6): 2S, 4S-4-chloroproline
  MOD_RES (7)..(7): Hydroxyproline
  MOD_RES (9)..(9): 2S, 4S-4-chloroproline
  MOD_RES (10)..(10): Hydroxyproline
  MOD_RES (12)..(12): 2S, 4S-4-chloroproline
  MOD_RES (13)..(13): Hydroxyproline
  MOD_RES (15)..(15): 2S, 4S-4-chloroproline
  MOD_RES (16)..(16): Hydroxyproline
  MOD_RES (18)..(18): 2S, 4S-4-chloroproline
  MOD_RES (19)..(19): Hydroxyproline
  MOD_RES (21)..(21): 2S, 4S-4-chloroproline
  MOD_RES (22)..(22): Hydroxyproline
  MOD_RES (24)..(24): 2S, 4S-4-chloroproline
  MOD_RES (25)..(25): Hydroxyproline
  MOD_RES (27)..(27): 2S, 4S-4-chloroproline
  MOD_RES (28)..(28): Hydroxyproline
XGPPGPPGPPGPPGPPGPPGPPGPPGPP

SEQ ID NO: 140 - protein, 28 aa, Artificial Sequence
  Description of Artificial Sequence: Synthetic peptide
  MOD_RES (1)..(1): 6-aminohexanoic acid
  MOD_RES (3)..(3): 2S, 4S-4-chloroproline
  MOD_RES (4)..(4): Hydroxyproline
  MOD_RES (6)..(6): 2S, 4S-4-chloroproline
  MOD_RES (7)..(7): Hydroxyproline
  MOD_RES (9)..(9): 2S, 4S-4-chloroproline
  MOD_RES (10)..(10): Hydroxyproline
  MOD_RES (12)..(12): 2S, 4S-4-chloroproline
  MOD_RES (13)..(13): Hydroxyproline
  MOD_RES (15)..(15): 2S, 4S-4-chloroproline
  MOD_RES (16)..(16): Hydroxyproline
  MOD_RES (18)..(18): 2S, 4S-4-chloroproline
  MOD_RES (19)..(19): Hydroxyproline
  MOD_RES (21)..(21): 2S, 4S-4-chloroproline
  MOD_RES (22)..(22): Hydroxyproline
  MOD_RES (24)..(24): 2S, 4S-4-chloroproline
  MOD_RES (25)..(25): Hydroxyproline
  MOD_RES (27)..(27): 2S, 4S-4-chloroproline
  MOD_RES (28)..(28): Hydroxyproline
XGPPGPPGPPGPPGPPGPPGPPGPPGPP

SEQ ID NO: 141 - protein, 28 aa, Artificial Sequence
  Description of Artificial Sequence: Synthetic peptide
  MOD_RES (1)..(1): 6-aminohexanoic acid
  MOD_RES (3)..(3): 2S, 4S-4-chloroproline
  MOD_RES (4)..(4): Hydroxyproline
  MOD_RES (6)..(6): 2S, 4S-4-chloroproline
  MOD_RES (7)..(7): Hydroxyproline
  MOD_RES (9)..(9): 2S, 4S-4-chloroproline
  MOD_RES (10)..(10): Hydroxyproline
  MOD_RES (12)..(12): 2S, 4S-4-chloroproline
  MOD_RES (13)..(13): Hydroxyproline
  MOD_RES (15)..(15): 2S, 4S-4-chloroproline
  MOD_RES (16)..(16): Hydroxyproline
  MOD_RES (18)..(18): 2S, 4S-4-chloroproline
  MOD_RES (19)..(19): Hydroxyproline
  MOD_RES (21)..(21): 2S, 4S-4-chloroproline
  MOD_RES (22)..(22): Hydroxyproline
  MOD_RES (24)..(24): 2S, 4S-4-chloroproline
  MOD_RES (25)..(25): Hydroxyproline
  MOD_RES (27)..(27): 2S, 4S-4-chloroproline
  MOD_RES (28)..(28): Hydroxyproline
XGPPGPPGPPGPPGPPGPPGPPGPPGPP

SEQ ID NO: 142 - protein, 30 aa, Artificial Sequence; identical to SEQ ID NO: 1
  Description of Artificial Sequence: Synthetic polypeptide
  MOD_RES (5)..(5): 2S, 4S-4-chloroproline
  MOD_RES (6)..(6): Hydroxyproline
  MOD_RES (8)..(8): 2S, 4S-4-chloroproline
  MOD_RES (9)..(9): Hydroxyproline
  MOD_RES (11)..(11): 2S, 4S-4-chloroproline
  MOD_RES (12)..(12): Hydroxyproline
  MOD_RES (14)..(14): 2S, 4S-4-chloroproline
  MOD_RES (15)..(15): Hydroxyproline
  MOD_RES (17)..(17): 2S, 4S-4-chloroproline
  MOD_RES (18)..(18): Hydroxyproline
  MOD_RES (20)..(20): 2S, 4S-4-chloroproline
  MOD_RES (21)..(21): Hydroxyproline
  MOD_RES (23)..(23): 2S, 4S-4-chloroproline
  MOD_RES (24)..(24): Hydroxyproline
  MOD_RES (26)..(26): 2S, 4S-4-chloroproline
  MOD_RES (27)..(27): Hydroxyproline
  MOD_RES (29)..(29): 2S, 4S-4-chloroproline
  MOD_RES (30)..(30): Hydroxyproline

SEQ ID NO: 143 - protein, 30 aa, Artificial Sequence; identical to SEQ ID NO: 1
  Description of Artificial Sequence: Synthetic polypeptide
  MOD_RES (5)..(5): 2S, 4S-4-chloroproline
  MOD_RES (6)..(6): Hydroxyproline
  MOD_RES (8)..(8): 2S, 4S-4-chloroproline
  MOD_RES (9)..(9): Hydroxyproline
  MOD_RES (11)..(11): 2S, 4S-4-chloroproline
  MOD_RES (12)..(12): Hydroxyproline
  MOD_RES (14)..(14): 2S, 4S-4-chloroproline
  MOD_RES (15)..(15): Hydroxyproline
  MOD_RES (17)..(17): 2S, 4S-4-chloroproline
  MOD_RES (18)..(18): Hydroxyproline
  MOD_RES (20)..(20): 2S, 4S-4-chloroproline
  MOD_RES (21)..(21): Hydroxyproline
  MOD_RES (23)..(23): 2S, 4S-4-chloroproline
  MOD_RES (24)..(24): Hydroxyproline
  MOD_RES (26)..(26): 2S, 4S-4-chloroproline
  MOD_RES (27)..(27): Hydroxyproline
  MOD_RES (29)..(29): 2S, 4S-4-chloroproline
  MOD_RES (30)..(30): Hydroxyproline

SEQ ID NO: 144 - protein, 30 aa, Artificial Sequence; identical to SEQ ID NO: 1
  Description of Artificial Sequence: Synthetic polypeptide
  MOD_RES (5)..(5): 2S, 4S-4-chloroproline
  MOD_RES (6)..(6): Hydroxyproline
  MOD_RES (8)..(8): 2S, 4S-4-chloroproline
  MOD_RES (9)..(9): Hydroxyproline
  MOD_RES (11)..(11): 2S, 4S-4-chloroproline
  MOD_RES (12)..(12): Hydroxyproline
  MOD_RES (14)..(14): 2S, 4S-4-chloroproline
  MOD_RES (15)..(15): Hydroxyproline
  MOD_RES (17)..(17): 2S, 4S-4-chloroproline
  MOD_RES (18)..(18): Hydroxyproline
  MOD_RES (20)..(20): 2S, 4S-4-chloroproline
  MOD_RES (21)..(21): Hydroxyproline
  MOD_RES (23)..(23): 2S, 4S-4-chloroproline
  MOD_RES (24)..(24): Hydroxyproline
  MOD_RES (26)..(26): 2S, 4S-4-chloroproline
  MOD_RES (27)..(27): Hydroxyproline
  MOD_RES (29)..(29): 2S, 4S-4-chloroproline
  MOD_RES (30)..(30): Hydroxyproline

SEQ ID NO: 145 - protein, 30 aa, Artificial Sequence; identical to SEQ ID NO: 1
  Description of Artificial Sequence: Synthetic polypeptide
  MOD_RES (5)..(5): 2S, 4S-4-chloroproline
  MOD_RES (6)..(6): Hydroxyproline
  MOD_RES (8)..(8): 2S, 4S-4-chloroproline
  MOD_RES (9)..(9): Hydroxyproline
  MOD_RES (11)..(11): 2S, 4S-4-chloroproline
  MOD_RES (12)..(12): Hydroxyproline
  MOD_RES (14)..(14): 2S, 4S-4-chloroproline
  MOD_RES (15)..(15): Hydroxyproline
  MOD_RES (17)..(17): 2S, 4S-4-chloroproline
  MOD_RES (18)..(18): Hydroxyproline
  MOD_RES (20)..(20): 2S, 4S-4-chloroproline
  MOD_RES (21)..(21): Hydroxyproline
  MOD_RES (23)..(23): 2S, 4S-4-chloroproline
  MOD_RES (24)..(24): Hydroxyproline
  MOD_RES (26)..(26): 2S, 4S-4-chloroproline
  MOD_RES (27)..(27): Hydroxyproline
  MOD_RES (29)..(29): 2S, 4S-4-chloroproline
  MOD_RES (30)..(30): Hydroxyproline

SEQ ID NO: 146 - protein, 30 aa, Artificial Sequence; identical to SEQ ID NO: 1
  Description of Artificial Sequence: Synthetic polypeptide
  MOD_RES (5)..(5): 2S, 4S-4-chloroproline
  MOD_RES (6)..(6): Hydroxyproline
  MOD_RES (8)..(8): 2S, 4S-4-chloroproline
  MOD_RES (9)..(9): Hydroxyproline
  MOD_RES (11)..(11): 2S, 4S-4-chloroproline
  MOD_RES (12)..(12): Hydroxyproline
  MOD_RES (14)..(14): 2S, 4S-4-chloroproline
  MOD_RES (15)..(15): Hydroxyproline
  MOD_RES (17)..(17): 2S, 4S-4-chloroproline
  MOD_RES (18)..(18): Hydroxyproline
  MOD_RES (20)..(20): 2S, 4S-4-chloroproline
  MOD_RES (21)..(21): Hydroxyproline
  MOD_RES (23)..(23): 2S, 4S-4-chloroproline
  MOD_RES (24)..(24): Hydroxyproline
  MOD_RES (26)..(26): 2S, 4S-4-chloroproline
  MOD_RES (27)..(27): Hydroxyproline
  MOD_RES (29)..(29): 2S, 4S-4-chloroproline
  MOD_RES (30)..(30): Hydroxyproline

SEQ ID NO: 147 - protein, 30 aa, Artificial Sequence; identical to SEQ ID NO: 1
  Description of Artificial Sequence: Synthetic polypeptide
  MOD_RES (5)..(5): 2S, 4S-4-chloroproline
  MOD_RES (6)..(6): Hydroxyproline
  MOD_RES (8)..(8): 2S, 4S-4-chloroproline
  MOD_RES (9)..(9): Hydroxyproline
  MOD_RES (11)..(11): 2S, 4S-4-chloroproline
  MOD_RES (12)..(12): Hydroxyproline
  MOD_RES (14)..(14): 2S, 4S-4-chloroproline
  MOD_RES (15)..(15): Hydroxyproline
  MOD_RES (17)..(17): 2S, 4S-4-chloroproline
  MOD_RES (18)..(18): Hydroxyproline
  MOD_RES (20)..(20): 2S, 4S-4-chloroproline
  MOD_RES (21)..(21): Hydroxyproline
  MOD_RES (23)..(23): 2S, 4S-4-chloroproline
  MOD_RES (24)..(24): Hydroxyproline
  MOD_RES (26)..(26): 2S, 4S-4-chloroproline
  MOD_RES (27)..(27): Hydroxyproline
  MOD_RES (29)..(29): 2S, 4S-4-chloroproline
  MOD_RES (30)..(30): Hydroxyproline

SEQ ID NO: 148 - protein, 30 aa, Artificial Sequence; identical to SEQ ID NO: 1
  Description of Artificial Sequence: Synthetic polypeptide
  MOD_RES (5)..(5): 2S, 4S-4-chloroproline
  MOD_RES (6)..(6): Hydroxyproline
  MOD_RES (8)..(8): 2S, 4S-4-chloroproline
  MOD_RES (9)..(9): Hydroxyproline
  MOD_RES (11)..(11): 2S, 4S-4-chloroproline
  MOD_RES (12)..(12): Hydroxyproline
  MOD_RES (14)..(14): 2S, 4S-4-chloroproline
  MOD_RES (15)..(15): Hydroxyproline
  MOD_RES (17)..(17): 2S, 4S-4-chloroproline
  MOD_RES (18)..(18): Hydroxyproline
  MOD_RES (20)..(20): 2S, 4S-4-chloroproline
  MOD_RES (21)..(21): Hydroxyproline
  MOD_RES (23)..(23): 2S, 4S-4-chloroproline
  MOD_RES (24)..(24): Hydroxyproline
  MOD_RES (26)..(26): 2S, 4S-4-chloroproline
  MOD_RES (27)..(27): Hydroxyproline
  MOD_RES (29)..(29): 2S, 4S-4-chloroproline
  MOD_RES (30)..(30): Hydroxyproline

SEQ ID NO: 149 - protein, 30 aa, Artificial Sequence; identical to SEQ ID NO: 1
  Description of Artificial Sequence: Synthetic polypeptide
  MOD_RES (5)..(5): 2S, 4S-4-chloroproline
  MOD_RES (6)..(6): Hydroxyproline
  MOD_RES (8)..(8): 2S, 4S-4-chloroproline
  MOD_RES (9)..(9): Hydroxyproline
  MOD_RES (11)..(11): 2S, 4S-4-chloroproline
  MOD_RES (12)..(12): Hydroxyproline
  MOD_RES (14)..(14): 2S, 4S-4-chloroproline
  MOD_RES (15)..(15): Hydroxyproline
  MOD_RES (17)..(17): 2S, 4S-4-chloroproline
  MOD_RES (18)..(18): Hydroxyproline
  MOD_RES (20)..(20): 2S, 4S-4-chloroproline
  MOD_RES (21)..(21): Hydroxyproline
  MOD_RES (23)..(23): 2S, 4S-4-chloroproline
  MOD_RES (24)..(24): Hydroxyproline
  MOD_RES (26)..(26): 2S, 4S-4-chloroproline
  MOD_RES (27)..(27): Hydroxyproline
  MOD_RES (29)..(29): 2S, 4S-4-chloroproline
  MOD_RES (30)..(30): Hydroxyproline

SEQ ID NO: 150 - protein, 30 aa, Artificial Sequence; identical to SEQ ID NO: 1
  Description of Artificial Sequence: Synthetic polypeptide
  MOD_RES (5)..(5): 2S, 4S-4-chloroproline
  MOD_RES (6)..(6): Hydroxyproline
  MOD_RES (8)..(8): 2S, 4S-4-chloroproline
  MOD_RES (9)..(9): Hydroxyproline
  MOD_RES (11)..(11): 2S, 4S-4-chloroproline
  MOD_RES (12)..(12): Hydroxyproline
  MOD_RES (14)..(14): 2S, 4S-4-chloroproline
  MOD_RES (15)..(15): Hydroxyproline
  MOD_RES (17)..(17): 2S, 4S-4-chloroproline
  MOD_RES (18)..(18): Hydroxyproline
  MOD_RES (20)..(20): 2S, 4S-4-chloroproline
  MOD_RES (21)..(21): Hydroxyproline
  MOD_RES (23)..(23): 2S, 4S-4-chloroproline
  MOD_RES (24)..(24): Hydroxyproline
  MOD_RES (26)..(26): 2S, 4S-4-chloroproline
  MOD_RES (27)..(27): Hydroxyproline
  MOD_RES (29)..(29): 2S, 4S-4-chloroproline
  MOD_RES (30)..(30): Hydroxyproline

SEQ ID NO: 151 - protein, 30 aa, Artificial Sequence; identical to SEQ ID NO: 1
  Description of Artificial Sequence: Synthetic polypeptide
  MOD_RES (5)..(5): 2S, 4S-4-chloroproline
  MOD_RES (6)..(6): Hydroxyproline
  MOD_RES (8)..(8): 2S, 4S-4-chloroproline
  MOD_RES (9)..(9): Hydroxyproline
  MOD_RES (11)..(11): 2S, 4S-4-chloroproline
  MOD_RES (12)..(12): Hydroxyproline
  MOD_RES (14)..(14): 2S, 4S-4-chloroproline
  MOD_RES (15)..(15): Hydroxyproline
  MOD_RES (17)..(17): 2S, 4S-4-chloroproline
  MOD_RES (18)..(18): Hydroxyproline
  MOD_RES (20)..(20): 2S, 4S-4-chloroproline
  MOD_RES (21)..(21): Hydroxyproline
  MOD_RES (23)..(23): 2S, 4S-4-chloroproline
  MOD_RES (24)..(24): Hydroxyproline
  MOD_RES (26)..(26): 2S, 4S-4-chloroproline
  MOD_RES (27)..(27): Hydroxyproline
  MOD_RES (29)..(29): 2S, 4S-4-chloroproline
  MOD_RES (30)..(30): Hydroxyproline

SEQ ID NO: 152 - protein, 30 aa, Artificial Sequence; identical to SEQ ID NO: 1
  Description of Artificial Sequence: Synthetic polypeptide
  MOD_RES (5)..(5): 2S, 4S-4-chloroproline
  MOD_RES (6)..(6): Hydroxyproline
  MOD_RES (8)..(8): 2S, 4S-4-chloroproline
  MOD_RES (9)..(9): Hydroxyproline
  MOD_RES (11)..(11): 2S, 4S-4-chloroproline
  MOD_RES (12)..(12): Hydroxyproline
  MOD_RES (14)..(14): 2S, 4S-4-chloroproline
  MOD_RES (15)..(15): Hydroxyproline
  MOD_RES (17)..(17): 2S, 4S-4-chloroproline
  MOD_RES (18)..(18): Hydroxyproline
  MOD_RES (20)..(20): 2S, 4S-4-chloroproline
  MOD_RES (21)..(21): Hydroxyproline
  MOD_RES (23)..(23): 2S, 4S-4-chloroproline
  MOD_RES (24)..(24): Hydroxyproline
  MOD_RES (26)..(26): 2S, 4S-4-chloroproline
  MOD_RES (27)..(27): Hydroxyproline
  MOD_RES (29)..(29): 2S, 4S-4-chloroproline
  MOD_RES (30)..(30): Hydroxyproline

SEQ ID NO: 153 - protein, 30 aa, Artificial Sequence; identical to SEQ ID NO: 1
  Description of Artificial Sequence: Synthetic polypeptide
  MOD_RES (5)..(5): 2S, 4S-4-chloroproline
  MOD_RES (6)..(6): Hydroxyproline
  MOD_RES (8)..(8): 2S, 4S-4-chloroproline
  MOD_RES (9)..(9): Hydroxyproline
  MOD_RES (11)..(11): 2S, 4S-4-chloroproline
  MOD_RES (12)..(12): Hydroxyproline
  MOD_RES (14)..(14): 2S, 4S-4-chloroproline
  MOD_RES (15)..(15): Hydroxyproline
  MOD_RES (17)..(17): 2S, 4S-4-chloroproline
  MOD_RES (18)..(18): Hydroxyproline
  MOD_RES (20)..(20): 2S, 4S-4-chloroproline
  MOD_RES (21)..(21): Hydroxyproline
  MOD_RES (23)..(23): 2S, 4S-4-chloroproline
  MOD_RES (24)..(24): Hydroxyproline
  MOD_RES (26)..(26): 2S, 4S-4-chloroproline
  MOD_RES (27)..(27): Hydroxyproline
  MOD_RES (29)..(29): 2S, 4S-4-chloroproline
  MOD_RES (30)..(30): Hydroxyproline

SEQ ID NO: 154 - protein, 30 aa, Artificial Sequence; identical to SEQ ID NO: 1
  Description of Artificial Sequence: Synthetic polypeptide
  MOD_RES (5)..(5): 2S, 4S-4-chloroproline
  MOD_RES (6)..(6): Hydroxyproline
  MOD_RES (8)..(8): 2S, 4S-4-chloroproline
  MOD_RES (9)..(9): Hydroxyproline
  MOD_RES (11)..(11): 2S, 4S-4-chloroproline
  MOD_RES (12)..(12): Hydroxyproline
  MOD_RES (14)..(14): 2S, 4S-4-chloroproline
  MOD_RES (15)..(15): Hydroxyproline
  MOD_RES (17)..(17): 2S, 4S-4-chloroproline
  MOD_RES (18)..(18): Hydroxyproline
  MOD_RES (20)..(20): 2S, 4S-4-chloroproline
  MOD_RES (21)..(21): Hydroxyproline
  MOD_RES (23)..(23): 2S, 4S-4-chloroproline
  MOD_RES (24)..(24): Hydroxyproline
  MOD_RES (26)..(26): 2S, 4S-4-chloroproline
  MOD_RES (27)..(27): Hydroxyproline
  MOD_RES (29)..(29): 2S, 4S-4-chloroproline
  MOD_RES (30)..(30): Hydroxyproline

SEQ ID NO: 155 - protein, 30 aa, Artificial Sequence; identical to SEQ ID NO: 1
  Description of Artificial Sequence: Synthetic polypeptide
  MOD_RES (5)..(5): 2S, 4S-4-chloroproline
  MOD_RES (6)..(6): Hydroxyproline
  MOD_RES (8)..(8): 2S, 4S-4-chloroproline
  MOD_RES (9)..(9): Hydroxyproline
  MOD_RES (11)..(11): 2S, 4S-4-chloroproline
  MOD_RES (12)..(12): Hydroxyproline
  MOD_RES (14)..(14): 2S, 4S-4-chloroproline
  MOD_RES (15)..(15): Hydroxyproline
  MOD_RES (17)..(17): 2S, 4S-4-chloroproline
  MOD_RES (18)..(18): Hydroxyproline
  MOD_RES (20)..(20): 2S, 4S-4-chloroproline
  MOD_RES (21)..(21): Hydroxyproline
  MOD_RES (23)..(23): 2S, 4S-4-chloroproline
  MOD_RES (24)..(24): Hydroxyproline
  MOD_RES (26)..(26): 2S, 4S-4-chloroproline
  MOD_RES (27)..(27): Hydroxyproline
  MOD_RES (29)..(29): 2S, 4S-4-chloroproline
  MOD_RES (30)..(30): Hydroxyproline

SEQ ID NO: 156 - protein, 30 aa, Artificial Sequence; identical to SEQ ID NO: 1
  Description of Artificial Sequence: Synthetic polypeptide
  MOD_RES (5)..(5): 2S, 4S-4-chloroproline
  MOD_RES (6)..(6): Hydroxyproline
  MOD_RES (8)..(8): 2S, 4S-4-chloroproline
  MOD_RES (9)..(9): Hydroxyproline
  MOD_RES (11)..(11): 2S, 4S-4-chloroproline
  MOD_RES (12)..(12): Hydroxyproline
  MOD_RES (14)..(14): 2S, 4S-4-chloroproline
  MOD_RES (15)..(15): Hydroxyproline
  MOD_RES (17)..(17): 2S, 4S-4-chloroproline
  MOD_RES (18)..(18): Hydroxyproline
  MOD_RES (20)..(20): 2S, 4S-4-chloroproline
  MOD_RES (21)..(21): Hydroxyproline
  MOD_RES (23)..(23): 2S, 4S-4-chloroproline
  MOD_RES (24)..(24): Hydroxyproline
  MOD_RES (26)..(26): 2S, 4S-4-chloroproline
  MOD_RES (27)..(27): Hydroxyproline
  MOD_RES (29)..(29): 2S, 4S-4-chloroproline
  MOD_RES (30)..(30): Hydroxyproline

SEQ ID NO: 157 - protein, 30 aa, Artificial Sequence; identical to SEQ ID NO: 1
  Description of Artificial Sequence: Synthetic polypeptide
  MOD_RES (5)..(5): 2S, 4S-4-chloroproline
  MOD_RES (6)..(6): Hydroxyproline
  MOD_RES (8)..(8): 2S, 4S-4-chloroproline
  MOD_RES (9)..(9): Hydroxyproline
  MOD_RES (11)..(11): 2S, 4S-4-chloroproline
  MOD_RES (12)..(12): Hydroxyproline
  MOD_RES (14)..(14): 2S, 4S-4-chloroproline
  MOD_RES (15)..(15): Hydroxyproline
  MOD_RES (17)..(17): 2S, 4S-4-chloroproline
  MOD_RES (18)..(18): Hydroxyproline
  MOD_RES (20)..(20): 2S, 4S-4-chloroproline
  MOD_RES (21)..(21): Hydroxyproline
  MOD_RES (23)..(23): 2S, 4S-4-chloroproline
  MOD_RES (24)..(24): Hydroxyproline
  MOD_RES (26)..(26): 2S, 4S-4-chloroproline
  MOD_RES (27)..(27): Hydroxyproline
  MOD_RES (29)..(29): 2S, 4S-4-chloroproline
  MOD_RES (30)..(30): Hydroxyproline

SEQ ID NO: 158 - protein, 30 aa, Artificial Sequence; identical to SEQ ID NO: 1
  Description of Artificial Sequence: Synthetic polypeptide
  MOD_RES (5)..(5): 2S, 4S-4-chloroproline
  MOD_RES (6)..(6): Hydroxyproline
  MOD_RES (8)..(8): 2S, 4S-4-chloroproline
  MOD_RES (9)..(9): Hydroxyproline
  MOD_RES (11)..(11): 2S, 4S-4-chloroproline
  MOD_RES (12)..(12): Hydroxyproline
  MOD_RES (14)..(14): 2S, 4S-4-chloroproline
  MOD_RES (15)..(15): Hydroxyproline
  MOD_RES (17)..(17): 2S, 4S-4-chloroproline
  MOD_RES (18)..(18): Hydroxyproline
  MOD_RES (20)..(20): 2S, 4S-4-chloroproline
  MOD_RES (21)..(21): Hydroxyproline
  MOD_RES (23)..(23): 2S, 4S-4-chloroproline
  MOD_RES (24)..(24): Hydroxyproline
  MOD_RES (26)..(26): 2S, 4S-4-chloroproline
  MOD_RES (27)..(27): Hydroxyproline
  MOD_RES (29)..(29): 2S, 4S-4-chloroproline
  MOD_RES (30)..(30): Hydroxyproline

SEQ ID NO: 159 - protein, 30 aa, Artificial Sequence; identical to SEQ ID NO: 1
  Description of Artificial Sequence: Synthetic polypeptide
  MOD_RES (5)..(5): 2S, 4S-4-chloroproline
  MOD_RES (6)..(6): Hydroxyproline
  MOD_RES (8)..(8): 2S, 4S-4-chloroproline
  MOD_RES (9)..(9): Hydroxyproline
  MOD_RES (11)..(11): 2S, 4S-4-chloroproline
  MOD_RES (12)..(12): Hydroxyproline
  MOD_RES (14)..(14): 2S, 4S-4-chloroproline
  MOD_RES (15)..(15): Hydroxyproline
  MOD_RES (17)..(17): 2S, 4S-4-chloroproline
  MOD_RES (18)..(18): Hydroxyproline
  MOD_RES (20)..(20): 2S, 4S-4-chloroproline
  MOD_RES (21)..(21): Hydroxyproline
  MOD_RES (23)..(23): 2S, 4S-4-chloroproline
  MOD_RES (24)..(24): Hydroxyproline
  MOD_RES (26)..(26): 2S, 4S-4-chloroproline
  MOD_RES (27)..(27): Hydroxyproline
  MOD_RES (29)..(29): 2S, 4S-4-chloroproline
  MOD_RES (30)..(30): Hydroxyproline

SEQ ID NO: 160 - protein, 30 aa, Artificial Sequence; identical to SEQ ID NO: 1
  Description of Artificial Sequence: Synthetic polypeptide
  MOD_RES (5)..(5): 2S, 4S-4-chloroproline
  MOD_RES (6)..(6): Hydroxyproline
  MOD_RES (8)..(8): 2S, 4S-4-chloroproline
  MOD_RES (9)..(9): Hydroxyproline
  MOD_RES (11)..(11): 2S, 4S-4-chloroproline
  MOD_RES (12)..(12): Hydroxyproline
  MOD_RES (14)..(14): 2S, 4S-4-chloroproline
  MOD_RES (15)..(15): Hydroxyproline
  MOD_RES (17)..(17): 2S, 4S-4-chloroproline
  MOD_RES (18)..(18): Hydroxyproline
  MOD_RES (20)..(20): 2S, 4S-4-chloroproline
  MOD_RES (21)..(21): Hydroxyproline
  MOD_RES (23)..(23): 2S, 4S-4-chloroproline
  MOD_RES (24)..(24): Hydroxyproline
  MOD_RES (26)..(26): 2S, 4S-4-chloroproline
  MOD_RES (27)..(27): Hydroxyproline
  MOD_RES (29)..(29): 2S, 4S-4-chloroproline
  MOD_RES (30)..(30): Hydroxyproline

SEQ ID NO: 161 - protein, 30 aa, Artificial Sequence; identical to SEQ ID NO: 1
  Description of Artificial Sequence: Synthetic polypeptide
  MOD_RES (5)..(5): 2S, 4S-4-chloroproline
  MOD_RES (6)..(6): Hydroxyproline
  MOD_RES (8)..(8): 2S, 4S-4-chloroproline
  MOD_RES (9)..(9): Hydroxyproline
  MOD_RES (11)..(11): 2S, 4S-4-chloroproline
  MOD_RES (12)..(12): Hydroxyproline
  MOD_RES (14)..(14): 2S, 4S-4-chloroproline
  MOD_RES (15)..(15): Hydroxyproline
  MOD_RES (17)..(17): 2S, 4S-4-chloroproline
  MOD_RES (18)..(18): Hydroxyproline
  MOD_RES (20)..(20): 2S, 4S-4-chloroproline
  MOD_RES (21)..(21): Hydroxyproline
  MOD_RES (23)..(23): 2S, 4S-4-chloroproline
  MOD_RES (24)..(24): Hydroxyproline
  MOD_RES (26)..(26): 2S, 4S-4-chloroproline
  MOD_RES (27)..(27): Hydroxyproline
  MOD_RES (29)..(29): 2S, 4S-4-chloroproline
  MOD_RES (30)..(30): Hydroxyproline

SEQ ID NO: 162 - protein, 30 aa, Artificial Sequence; identical to SEQ ID NO: 1
  Description of Artificial Sequence: Synthetic polypeptide
  MOD_RES (5)..(5): 2S, 4S-4-chloroproline
  MOD_RES (6)..(6): Hydroxyproline
  MOD_RES (8)..(8): 2S, 4S-4-chloroproline
  MOD_RES (9)..(9): Hydroxyproline
  MOD_RES (11)..(11): 2S, 4S-4-chloroproline
  MOD_RES (12)..(12): Hydroxyproline
  MOD_RES (14)..(14): 2S, 4S-4-chloroproline
  MOD_RES (15)..(15): Hydroxyproline
  MOD_RES (17)..(17): 2S, 4S-4-chloroproline
  MOD_RES (18)..(18): Hydroxyproline
  MOD_RES (20)..(20): 2S, 4S-4-chloroproline
  MOD_RES (21)..(21): Hydroxyproline
  MOD_RES (23)..(23): 2S, 4S-4-chloroproline
  MOD_RES (24)..(24): Hydroxyproline
  MOD_RES (26)..(26): 2S, 4S-4-chloroproline
  MOD_RES (27)..(27): Hydroxyproline
  MOD_RES (29)..(29): 2S, 4S-4-chloroproline
  MOD_RES (30)..(30): Hydroxyproline

SEQ ID NO: 163 - protein, 30 aa, Artificial Sequence; identical to SEQ ID NO: 1
  Description of Artificial Sequence: Synthetic polypeptide
  MOD_RES (5)..(5): 2S, 4S-4-chloroproline
  MOD_RES (6)..(6): Hydroxyproline
  MOD_RES (8)..(8): 2S, 4S-4-chloroproline
  MOD_RES (9)..(9): Hydroxyproline
  MOD_RES (11)..(11): 2S, 4S-4-chloroproline
  MOD_RES (12)..(12): Hydroxyproline
  MOD_RES (14)..(14): 2S, 4S-4-chloroproline
  MOD_RES (15)..(15): Hydroxyproline
  MOD_RES (17)..(17): 2S, 4S-4-chloroproline
  MOD_RES (18)..(18): Hydroxyproline
  MOD_RES (20)..(20): 2S, 4S-4-chloroproline
  MOD_RES (21)..(21): Hydroxyproline
  MOD_RES (23)..(23): 2S, 4S-4-chloroproline
  MOD_RES (24)..(24): Hydroxyproline
  MOD_RES (26)..(26): 2S, 4S-4-chloroproline
  MOD_RES (27)..(27): Hydroxyproline
  MOD_RES (29)..(29): 2S, 4S-4-chloroproline
  MOD_RES (30)..(30): Hydroxyproline

SEQ ID NO: 164 - protein, 30 aa, Artificial Sequence; identical to SEQ ID NO: 1
  Description of Artificial Sequence: Synthetic polypeptide
  MOD_RES (5)..(5): 2S, 4S-4-chloroproline
  MOD_RES (6)..(6): Hydroxyproline
  MOD_RES (8)..(8): 2S, 4S-4-chloroproline
  MOD_RES (9)..(9): Hydroxyproline
  MOD_RES (11)..(11): 2S, 4S-4-chloroproline
  MOD_RES (12)..(12): Hydroxyproline
  MOD_RES (14)..(14): 2S, 4S-4-chloroproline
  MOD_RES (15)..(15): Hydroxyproline
  MOD_RES (17)..(17): 2S, 4S-4-chloroproline
  MOD_RES (18)..(18): Hydroxyproline
  MOD_RES (20)..(20): 2S, 4S-4-chloroproline
  MOD_RES (21)..(21): Hydroxyproline
  MOD_RES (23)..(23): 2S, 4S-4-chloroproline
  MOD_RES (24)..(24): Hydroxyproline
  MOD_RES (26)..(26): 2S, 4S-4-chloroproline
  MOD_RES (27)..(27): Hydroxyproline
  MOD_RES (29)..(29): 2S, 4S-4-chloroproline
  MOD_RES (30)..(30): Hydroxyproline

SEQ ID NO: 165 - protein, 30 aa, Artificial Sequence; identical to SEQ ID NO: 1
  Description of Artificial Sequence: Synthetic polypeptide
  MOD_RES (5)..(5): 2S, 4S-4-chloroproline
  MOD_RES (6)..(6): Hydroxyproline
  MOD_RES (8)..(8): 2S, 4S-4-chloroproline
  MOD_RES (9)..(9): Hydroxyproline
  MOD_RES (11)..(11): 2S, 4S-4-chloroproline
  MOD_RES (12)..(12): Hydroxyproline
  MOD_RES (14)..(14): 2S, 4S-4-chloroproline
  MOD_RES (15)..(15): Hydroxyproline
  MOD_RES (17)..(17): 2S, 4S-4-chloroproline
  MOD_RES (18)..(18): Hydroxyproline
  MOD_RES (20)..(20): 2S, 4S-4-chloroproline
  MOD_RES (21)..(21): Hydroxyproline
  MOD_RES (23)..(23): 2S, 4S-4-chloroproline
  MOD_RES (24)..(24): Hydroxyproline
  MOD_RES (26)..(26): 2S, 4S-4-chloroproline
  MOD_RES (27)..(27): Hydroxyproline
  MOD_RES (29)..(29): 2S, 4S-4-chloroproline
  MOD_RES (30)..(30): Hydroxyproline

SEQ ID NO: 166 - protein, 30 aa, Artificial Sequence; identical to SEQ ID NO: 1
  Description of Artificial Sequence: Synthetic polypeptide
  MOD_RES (5)..(5): 2S, 4S-4-chloroproline
  MOD_RES (6)..(6): Hydroxyproline
  MOD_RES (8)..(8): 2S, 4S-4-chloroproline
  MOD_RES (9)..(9): Hydroxyproline
  MOD_RES (11)..(11): 2S, 4S-4-chloroproline
  MOD_RES (12)..(12): Hydroxyproline
  MOD_RES (14)..(14): 2S, 4S-4-chloroproline
  MOD_RES (15)..(15): Hydroxyproline
  MOD_RES (17)..(17): 2S, 4S-4-chloroproline
  MOD_RES (18)..(18): Hydroxyproline
  MOD_RES (20)..(20): 2S, 4S-4-chloroproline
  MOD_RES (21)..(21): Hydroxyproline
  MOD_RES (23)..(23): 2S, 4S-4-chloroproline
  MOD_RES (24)..(24): Hydroxyproline
  MOD_RES (26)..(26): 2S, 4S-4-chloroproline
  MOD_RES (27)..(27): Hydroxyproline
  MOD_RES (29)..(29): 2S, 4S-4-chloroproline
  MOD_RES (30)..(30): Hydroxyproline

SEQ ID NO: 167 - protein, 30 aa, Artificial Sequence; identical to SEQ ID NO: 1
  Description of Artificial Sequence: Synthetic polypeptide
  MOD_RES (5)..(5): 2S, 4S-4-chloroproline
  MOD_RES (6)..(6): Hydroxyproline
  MOD_RES (8)..(8): 2S, 4S-4-chloroproline
  MOD_RES (9)..(9): Hydroxyproline
  MOD_RES (11)..(11): 2S, 4S-4-chloroproline
  MOD_RES (12)..(12): Hydroxyproline
  MOD_RES (14)..(14): 2S, 4S-4-chloroproline
  MOD_RES (15)..(15): Hydroxyproline
  MOD_RES (17)..(17): 2S, 4S-4-chloroproline
  MOD_RES (18)..(18): Hydroxyproline
  MOD_RES (20)..(20): 2S, 4S-4-chloroproline
  MOD_RES (21)..(21): Hydroxyproline
  MOD_RES (23)..(23): 2S, 4S-4-chloroproline
  MOD_RES (24)..(24): Hydroxyproline
  MOD_RES (26)..(26): 2S, 4S-4-chloroproline
  MOD_RES (27)..(27): Hydroxyproline
  MOD_RES (29)..(29): 2S, 4S-4-chloroproline
  MOD_RES (30)..(30): Hydroxyproline

SEQ ID NO: 168 - protein, 30 aa, Artificial Sequence; identical to SEQ ID NO: 1
  Description of Artificial Sequence: Synthetic polypeptide
  MOD_RES (5)..(5): 2S, 4S-4-chloroproline
  MOD_RES (6)..(6): Hydroxyproline
  MOD_RES (8)..(8): 2S, 4S-4-chloroproline
  MOD_RES (9)..(9): Hydroxyproline
  MOD_RES (11)..(11): 2S, 4S-4-chloroproline
  MOD_RES (12)..(12): Hydroxyproline
  MOD_RES (14)..(14): 2S, 4S-4-chloroproline
  MOD_RES (15)..(15): Hydroxyproline
  MOD_RES (17)..(17): 2S, 4S-4-chloroproline
  MOD_RES (18)..(18): Hydroxyproline
  MOD_RES (20)..(20): 2S, 4S-4-chloroproline
  MOD_RES (21)..(21): Hydroxyproline
  MOD_RES (23)..(23): 2S, 4S-4-chloroproline
  MOD_RES (24)..(24): Hydroxyproline
  MOD_RES (26)..(26): 2S, 4S-4-chloroproline
  MOD_RES (27)..(27): Hydroxyproline
  MOD_RES (29)..(29): 2S, 4S-4-chloroproline
  MOD_RES (30)..(30): Hydroxyproline

SEQ ID NO: 169 - protein, 30 aa, Artificial Sequence; identical to SEQ ID NO: 1
  Description of Artificial Sequence: Synthetic polypeptide
  MOD_RES (5)..(5): 2S, 4S-4-chloroproline
  MOD_RES (6)..(6): Hydroxyproline
  MOD_RES (8)..(8): 2S, 4S-4-chloroproline
  MOD_RES (9)..(9): Hydroxyproline
  MOD_RES (11)..(11): 2S, 4S-4-chloroproline
  MOD_RES (12)..(12): Hydroxyproline
  MOD_RES (14)..(14): 2S, 4S-4-chloroproline
  MOD_RES (15)..(15): Hydroxyproline
  MOD_RES (17)..(17): 2S, 4S-4-chloroproline
  MOD_RES (18)..(18): Hydroxyproline
  MOD_RES (20)..(20): 2S, 4S-4-chloroproline
  MOD_RES (21)..(21): Hydroxyproline
  MOD_RES (23)..(23): 2S, 4S-4-chloroproline
  MOD_RES (24)..(24): Hydroxyproline
  MOD_RES (26)..(26): 2S, 4S-4-chloroproline
  MOD_RES (27)..(27): Hydroxyproline
  MOD_RES (29)..(29): 2S, 4S-4-chloroproline
  MOD_RES (30)..(30): Hydroxyproline

SEQ ID NO: 170 - protein, 30 aa, Artificial Sequence; identical to SEQ ID NO: 1
  Description of Artificial Sequence: Synthetic polypeptide
  MOD_RES (5)..(5): Hydroxyproline
  MOD_RES (8)..(8): Hydroxyproline
  MOD_RES (11)..(11): Hydroxyproline
  MOD_RES (14)..(14): Hydroxyproline
  MOD_RES (17)..(17): Hydroxyproline
  MOD_RES (20)..(20): Hydroxyproline
  MOD_RES (23)..(23): Hydroxyproline
  MOD_RES (26)..(26): Hydroxyproline
  MOD_RES (29)..(29): Hydroxyproline

SEQ ID NO: 171 - protein, 30 aa, Artificial Sequence; identical to SEQ ID NO: 1
  Description of Artificial Sequence: Synthetic polypeptide
  MOD_RES (5)..(5): Hydroxyproline
  MOD_RES (8)..(8): Hydroxyproline
  MOD_RES (11)..(11): Hydroxyproline
  MOD_RES (14)..(14): Hydroxyproline
  MOD_RES (17)..(17): Hydroxyproline
  MOD_RES (20)..(20): Hydroxyproline
  MOD_RES (23)..(23): Hydroxyproline
  MOD_RES (26)..(26): Hydroxyproline
  MOD_RES (29)..(29): Hydroxyproline

SEQ ID NO: 172 - protein, 30 aa, Artificial Sequence; identical to SEQ ID NO: 1
  Description of Artificial Sequence: Synthetic polypeptide
  MOD_RES (5)..(5): Hydroxyproline
  MOD_RES (8)..(8): Hydroxyproline
  MOD_RES (11)..(11): Hydroxyproline
  MOD_RES (14)..(14): Hydroxyproline
  MOD_RES (17)..(17): Hydroxyproline
  MOD_RES (20)..(20): Hydroxyproline
  MOD_RES (23)..(23): Hydroxyproline
  MOD_RES (26)..(26): Hydroxyproline
  MOD_RES (29)..(29): Hydroxyproline

SEQ ID NO: 173 - protein, 30 aa, Artificial Sequence; identical to SEQ ID NO: 1
  Description of Artificial Sequence: Synthetic polypeptide
  MOD_RES (5)..(5): Hydroxyproline
  MOD_RES (8)..(8): Hydroxyproline
  MOD_RES (11)..(11): Hydroxyproline
  MOD_RES (14)..(14): Hydroxyproline
  MOD_RES (17)..(17): Hydroxyproline
  MOD_RES (20)..(20): Hydroxyproline
  MOD_RES (23)..(23): Hydroxyproline
  MOD_RES (26)..(26): Hydroxyproline
  MOD_RES (29)..(29): Hydroxyproline

SEQ ID NO: 174 - protein, 30 aa, Artificial Sequence; identical to SEQ ID NO: 1
  Description of Artificial Sequence: Synthetic polypeptide
  MOD_RES (5)..(5): Hydroxyproline
  MOD_RES (8)..(8): Hydroxyproline
  MOD_RES (11)..(11): Hydroxyproline
  MOD_RES (14)..(14): Hydroxyproline
  MOD_RES (17)..(17): Hydroxyproline
  MOD_RES (20)..(20): Hydroxyproline
  MOD_RES (23)..(23): Hydroxyproline
  MOD_RES (26)..(26): Hydroxyproline
  MOD_RES (29)..(29): Hydroxyproline

SEQ ID NO: 175 - protein, 30 aa, Artificial Sequence; identical to SEQ ID NO: 1
  Description of Artificial Sequence: Synthetic polypeptide
  MOD_RES (5)..(5): Hydroxyproline
  MOD_RES (8)..(8): Hydroxyproline
  MOD_RES (11)..(11): Hydroxyproline
  MOD_RES (14)..(14): Hydroxyproline
  MOD_RES (17)..(17): Hydroxyproline
  MOD_RES (20)..(20): Hydroxyproline
  MOD_RES (23)..(23): Hydroxyproline
  MOD_RES (26)..(26): Hydroxyproline
  MOD_RES (29)..(29): Hydroxyproline

SEQ ID NO: 176 - protein, 30 aa, Artificial Sequence; identical to SEQ ID NO: 1
  Description of Artificial Sequence: Synthetic polypeptide
  MOD_RES (5)..(5): Hydroxyproline
  MOD_RES (8)..(8): Hydroxyproline
  MOD_RES (11)..(11): Hydroxyproline
  MOD_RES (14)..(14): Hydroxyproline
  MOD_RES (17)..(17): Hydroxyproline
  MOD_RES (20)..(20): Hydroxyproline
  MOD_RES (23)..(23): Hydroxyproline
  MOD_RES (26)..(26): Hydroxyproline
  MOD_RES (29)..(29): Hydroxyproline

SEQ ID NO: 177 - protein, 30 aa, Artificial Sequence; identical to SEQ ID NO: 1
  Description of Artificial Sequence: Synthetic polypeptide
  MOD_RES (5)..(5): Hydroxyproline
  MOD_RES (8)..(8): Hydroxyproline
  MOD_RES (11)..(11): Hydroxyproline
  MOD_RES (14)..(14): Hydroxyproline
  MOD_RES (17)..(17): Hydroxyproline
  MOD_RES (20)..(20): Hydroxyproline
  MOD_RES (23)..(23): Hydroxyproline
  MOD_RES (26)..(26): Hydroxyproline
  MOD_RES (29)..(29): Hydroxyproline

SEQ ID NO: 178 - protein, 30 aa, Artificial Sequence; identical to SEQ ID NO: 1
  Description of Artificial Sequence: Synthetic polypeptide
  MOD_RES (5)..(5): Hydroxyproline
  MOD_RES (8)..(8): Hydroxyproline
  MOD_RES (11)..(11): Hydroxyproline
  MOD_RES (14)..(14): Hydroxyproline
  MOD_RES (17)..(17): Hydroxyproline
  MOD_RES (20)..(20): Hydroxyproline
  MOD_RES (23)..(23): Hydroxyproline
  MOD_RES (26)..(26): Hydroxyproline
  MOD_RES (29)..(29): Hydroxyproline

SEQ ID NO: 179 - protein, 30 aa, Artificial Sequence; identical to SEQ ID NO: 1
  Description of Artificial Sequence: Synthetic polypeptide
  MOD_RES (5)..(5): Hydroxyproline
  MOD_RES (8)..(8): Hydroxyproline
  MOD_RES (11)..(11): Hydroxyproline
  MOD_RES (14)..(14): Hydroxyproline
  MOD_RES (17)..(17): Hydroxyproline
  MOD_RES (20)..(20): Hydroxyproline
  MOD_RES (23)..(23): Hydroxyproline
  MOD_RES (26)..(26): Hydroxyproline
  MOD_RES (29)..(29): Hydroxyproline

SEQ ID NO: 180 - protein, 30 aa, Artificial Sequence; identical to SEQ ID NO: 1
  Description of Artificial Sequence: Synthetic polypeptide
  MOD_RES (5)..(5): Hydroxyproline
  MOD_RES (8)..(8): Hydroxyproline
  MOD_RES (11)..(11): Hydroxyproline
  MOD_RES (14)..(14): Hydroxyproline
  MOD_RES (17)..(17): Hydroxyproline
  MOD_RES (20)..(20): Hydroxyproline
  MOD_RES (23)..(23): Hydroxyproline
  MOD_RES (26)..(26): Hydroxyproline
  MOD_RES (29)..(29): Hydroxyproline

SEQ ID NO: 181 - protein, 30 aa, Artificial Sequence; identical to SEQ ID NO: 1
  Description of Artificial Sequence: Synthetic polypeptide
  MOD_RES (5)..(5): Hydroxyproline
  MOD_RES (8)..(8): Hydroxyproline
  MOD_RES (11)..(11): Hydroxyproline
  MOD_RES (14)..(14): Hydroxyproline
  MOD_RES (17)..(17): Hydroxyproline
  MOD_RES (20)..(20): Hydroxyproline
  MOD_RES (23)..(23): Hydroxyproline
  MOD_RES (26)..(26): Hydroxyproline
  MOD_RES (29)..(29): Hydroxyproline

SEQ ID NO: 182 - protein, 30 aa, Artificial Sequence; identical to SEQ ID NO: 1
  Description of Artificial Sequence: Synthetic polypeptide
  MOD_RES (5)..(5): Hydroxyproline
  MOD_RES (8)..(8): Hydroxyproline
  MOD_RES (11)..(11): Hydroxyproline
  MOD_RES (14)..(14): Hydroxyproline
  MOD_RES (17)..(17): Hydroxyproline
  MOD_RES (20)..(20): Hydroxyproline
  MOD_RES (23)..(23): Hydroxyproline
  MOD_RES (26)..(26): Hydroxyproline
  MOD_RES (29)..(29): Hydroxyproline

SEQ ID NO: 183 - protein, 30 aa, Artificial Sequence; identical to SEQ ID NO: 1
  Description of Artificial Sequence: Synthetic polypeptide
  MOD_RES (5)..(5): Hydroxyproline
  MOD_RES (8)..(8): Hydroxyproline
  MOD_RES (11)..(11): Hydroxyproline
  MOD_RES (14)..(14): Hydroxyproline
  MOD_RES (17)..(17): Hydroxyproline
  MOD_RES (20)..(20): Hydroxyproline
  MOD_RES (23)..(23): Hydroxyproline
  MOD_RES (26)..(26): Hydroxyproline
  MOD_RES (29)..(29): Hydroxyproline

SEQ ID NO: 184 - protein, 30 aa, Artificial Sequence; identical to SEQ ID NO: 1
  Description of Artificial Sequence: Synthetic polypeptide
  MOD_RES (5)..(5): Hydroxyproline
  MOD_RES (8)..(8): Hydroxyproline
  MOD_RES (11)..(11): Hydroxyproline
  MOD_RES (14)..(14): Hydroxyproline
  MOD_RES (17)..(17): Hydroxyproline
  MOD_RES (20)..(20): Hydroxyproline
  MOD_RES (23)..(23): Hydroxyproline
  MOD_RES (26)..(26): Hydroxyproline
  MOD_RES (29)..(29): Hydroxyproline

SEQ ID NO: 185 - protein, 30 aa, Artificial Sequence; identical to SEQ ID NO: 1
  Description of Artificial Sequence: Synthetic polypeptide
  MOD_RES (5)..(5): Hydroxyproline
  MOD_RES (8)..(8): Hydroxyproline
  MOD_RES (11)..(11): Hydroxyproline
  MOD_RES (14)..(14): Hydroxyproline
  MOD_RES (17)..(17): Hydroxyproline
  MOD_RES (20)..(20): Hydroxyproline
  MOD_RES (23)..(23): Hydroxyproline
  MOD_RES (26)..(26): Hydroxyproline
  MOD_RES (29)..(29): Hydroxyproline

SEQ ID NO: 186 - protein, 30 aa, Artificial Sequence; identical to SEQ ID NO: 1
  Description of Artificial Sequence: Synthetic polypeptide
  MOD_RES (5)..(5): Hydroxyproline
  MOD_RES (8)..(8): Hydroxyproline
  MOD_RES (11)..(11): Hydroxyproline
  MOD_RES (14)..(14): Hydroxyproline
  MOD_RES (17)..(17): Hydroxyproline
  MOD_RES (20)..(20): Hydroxyproline
  MOD_RES (23)..(23): Hydroxyproline
  MOD_RES (26)..(26): Hydroxyproline
  MOD_RES (29)..(29): Hydroxyproline

SEQ ID NO: 187 - protein, 30 aa, Artificial Sequence; identical to SEQ ID NO: 1
  Description of Artificial Sequence: Synthetic polypeptide
  MOD_RES (5)..(5): Hydroxyproline
  MOD_RES (8)..(8): Hydroxyproline
  MOD_RES (11)..(11): Hydroxyproline
  MOD_RES (14)..(14): Hydroxyproline
  MOD_RES (17)..(17): Hydroxyproline
  MOD_RES (20)..(20): Hydroxyproline
  MOD_RES (23)..(23): Hydroxyproline
  MOD_RES (26)..(26): Hydroxyproline
  MOD_RES (29)..(29): Hydroxyproline

SEQ ID NO: 188 - protein, 30 aa, Artificial Sequence; identical to SEQ ID NO: 1
  Description of Artificial Sequence: Synthetic polypeptide
  MOD_RES (5)..(5): Hydroxyproline
  MOD_RES (8)..(8): Hydroxyproline
  MOD_RES (11)..(11): Hydroxyproline
  MOD_RES (14)..(14): Hydroxyproline
  MOD_RES (17)..(17): Hydroxyproline
  MOD_RES (20)..(20): Hydroxyproline
  MOD_RES (23)..(23): Hydroxyproline
  MOD_RES (26)..(26): Hydroxyproline
  MOD_RES (29)..(29): Hydroxyproline

SEQ ID NO: 189 - protein, 30 aa, Artificial Sequence; identical to SEQ ID NO: 1
  Description of Artificial Sequence: Synthetic polypeptide
  MOD_RES (5)..(5): Hydroxyproline
  MOD_RES (8)..(8): Hydroxyproline
  MOD_RES (11)..(11): Hydroxyproline
  MOD_RES (14)..(14): Hydroxyproline
  MOD_RES (17)..(17): Hydroxyproline
  MOD_RES (20)..(20): Hydroxyproline
  MOD_RES (23)..(23): Hydroxyproline
  MOD_RES (26)..(26): Hydroxyproline
  MOD_RES (29)..(29): Hydroxyproline

SEQ ID NO: 190 - protein, 30 aa, Artificial Sequence; identical to SEQ ID NO: 1
  Description of Artificial Sequence: Synthetic polypeptide
  MOD_RES (5)..(5): Hydroxyproline
  MOD_RES (8)..(8): Hydroxyproline
  MOD_RES (11)..(11): Hydroxyproline
  MOD_RES (14)..(14): Hydroxyproline
  MOD_RES (17)..(17): Hydroxyproline
  MOD_RES (20)..(20): Hydroxyproline
  MOD_RES (23)..(23): Hydroxyproline
  MOD_RES (26)..(26): Hydroxyproline
  MOD_RES (29)..(29): Hydroxyproline

SEQ ID NO: 191 - protein, 30 aa, Artificial Sequence; identical to SEQ ID NO: 1
  Description of Artificial Sequence: Synthetic polypeptide
  MOD_RES (5)..(5): Hydroxyproline
  MOD_RES (8)..(8): Hydroxyproline
  MOD_RES (11)..(11): Hydroxyproline
  MOD_RES (14)..(14): Hydroxyproline
  MOD_RES (17)..(17): Hydroxyproline
  MOD_RES (20)..(20): Hydroxyproline
  MOD_RES (23)..(23): Hydroxyproline
  MOD_RES (26)..(26): Hydroxyproline
  MOD_RES (29)..(29): Hydroxyproline

SEQ ID NO: 192 - protein, 30 aa, Artificial Sequence; identical to SEQ ID NO: 1
  Description of Artificial Sequence: Synthetic polypeptide
  MOD_RES (5)..(5): Hydroxyproline
  MOD_RES (8)..(8): Hydroxyproline
  MOD_RES (11)..(11): Hydroxyproline
  MOD_RES (14)..(14): Hydroxyproline
  MOD_RES (17)..(17): Hydroxyproline
  MOD_RES (20)..(20): Hydroxyproline
  MOD_RES (23)..(23): Hydroxyproline
  MOD_RES (26)..(26): Hydroxyproline
  MOD_RES (29)..(29): Hydroxyproline

SEQ ID NO: 193 - protein, 30 aa, Artificial Sequence; identical to SEQ ID NO: 1
  Description of Artificial Sequence: Synthetic polypeptide
  MOD_RES (5)..(5): Hydroxyproline
  MOD_RES (8)..(8): Hydroxyproline
  MOD_RES (11)..(11): Hydroxyproline
  MOD_RES (14)..(14): Hydroxyproline
  MOD_RES (17)..(17): Hydroxyproline
  MOD_RES (20)..(20): Hydroxyproline
  MOD_RES (23)..(23): Hydroxyproline
  MOD_RES (26)..(26): Hydroxyproline
  MOD_RES (29)..(29): Hydroxyproline

SEQ ID NO: 194 - protein, 30 aa, Artificial Sequence; identical to SEQ ID NO: 1
  Description of Artificial Sequence: Synthetic polypeptide
  MOD_RES (5)..(5): Hydroxyproline
  MOD_RES (8)..(8): Hydroxyproline
  MOD_RES (11)..(11): Hydroxyproline
  MOD_RES (14)..(14): Hydroxyproline
  MOD_RES (17)..(17): Hydroxyproline
  MOD_RES (20)..(20): Hydroxyproline
  MOD_RES (23)..(23): Hydroxyproline
  MOD_RES (26)..(26): Hydroxyproline
  MOD_RES (29)..(29): Hydroxyproline

SEQ ID NO: 195 - protein, 30 aa, Artificial Sequence; identical to SEQ ID NO: 1
  Description of Artificial Sequence: Synthetic polypeptide
  MOD_RES (5)..(5): Hydroxyproline
  MOD_RES (8)..(8): Hydroxyproline
  MOD_RES (11)..(11): Hydroxyproline
  MOD_RES (14)..(14): Hydroxyproline
  MOD_RES (17)..(17): Hydroxyproline
  MOD_RES (20)..(20): Hydroxyproline
  MOD_RES (23)..(23): Hydroxyproline
  MOD_RES (26)..(26): Hydroxyproline
  MOD_RES (29)..(29): Hydroxyproline

SEQ ID NO: 196 - protein, 30 aa, Artificial Sequence; identical to SEQ ID NO: 1
  Description of Artificial Sequence: Synthetic polypeptide
  MOD_RES (5)..(5): Hydroxyproline
  MOD_RES (8)..(8): Hydroxyproline
  MOD_RES (11)..(11): Hydroxyproline
  MOD_RES (14)..(14): Hydroxyproline
  MOD_RES (17)..(17): Hydroxyproline
  MOD_RES (20)..(20): Hydroxyproline
  MOD_RES (23)..(23): Hydroxyproline
  MOD_RES (26)..(26): Hydroxyproline
  MOD_RES (29)..(29): Hydroxyproline

SEQ ID NO: 197 - protein, 30 aa, Artificial Sequence; identical to SEQ ID NO: 1
  Description of Artificial Sequence: Synthetic polypeptide
  MOD_RES (5)..(5): Hydroxyproline
  MOD_RES (8)..(8): Hydroxyproline
  MOD_RES (11)..(11): Hydroxyproline
  MOD_RES (14)..(14): Hydroxyproline
  MOD_RES (17)..(17): Hydroxyproline
  MOD_RES (20)..(20): Hydroxyproline
  MOD_RES (23)..(23): Hydroxyproline
  MOD_RES (26)..(26): Hydroxyproline
  MOD_RES (29)..(29): Hydroxyproline

SEQ ID NO: 198 - protein, 28 aa, Artificial Sequence
  Description of Artificial Sequence: Synthetic peptide
  MOD_RES (1)..(1): 6-aminohexanoic acid
  MOD_RES (3)..(3): Hydroxyproline
  MOD_RES (6)..(6): Hydroxyproline
  MOD_RES (9)..(9): Hydroxyproline
  MOD_RES (12)..(12): Hydroxyproline
  MOD_RES (15)..(15): Hydroxyproline
  MOD_RES (18)..(18): Hydroxyproline
  MOD_RES (21)..(21): Hydroxyproline
  MOD_RES (24)..(24): Hydroxyproline
  MOD_RES (27)..(27): Hydroxyproline
XGPPGPPGPPGPPGPPGPPGPPGPPGPP

SEQ ID NO: 199 - protein, 28 aa, Artificial Sequence
  Description of Artificial Sequence: Synthetic peptide
  MOD_RES (1)..(1): 6-aminohexanoic acid
  MOD_RES (3)..(3): Hydroxyproline
  MOD_RES (6)..(6): Hydroxyproline
  MOD_RES (9)..(9): Hydroxyproline
  MOD_RES (12)..(12): Hydroxyproline
  MOD_RES (15)..(15): Hydroxyproline
  MOD_RES (18)..(18): Hydroxyproline
  MOD_RES (21)..(21): Hydroxyproline
  MOD_RES (24)..(24): Hydroxyproline
  MOD_RES (27)..(27): Hydroxyproline
XGPPGPPGPPGPPGPPGPPGPPGPPGPP

SEQ ID NO: 200 - protein, 28 aa, Artificial Sequence
  Description of Artificial Sequence: Synthetic peptide
  MOD_RES (1)..(1): 6-aminohexanoic acid
  MOD_RES (3)..(3): Hydroxyproline
  MOD_RES (6)..(6): Hydroxyproline
  MOD_RES (9)..(9): Hydroxyproline
  MOD_RES (12)..(12): Hydroxyproline
  MOD_RES (15)..(15): Hydroxyproline
  MOD_RES (18)..(18): Hydroxyproline
  MOD_RES (21)..(21): Hydroxyproline
  MOD_RES (24)..(24): Hydroxyproline
  MOD_RES (27)..(27): Hydroxyproline
XGPPGPPGPPGPPGPPGPPGPPGPPGPP

SEQ ID NO: 201 - protein, 28 aa, Artificial Sequence
  Description of Artificial Sequence: Synthetic peptide
  MOD_RES (1)..(1): 6-aminohexanoic acid
  MOD_RES (3)..(3): Hydroxyproline
  MOD_RES (6)..(6): Hydroxyproline
  MOD_RES (9)..(9): Hydroxyproline
  MOD_RES (12)..(12): Hydroxyproline
  MOD_RES (15)..(15): Hydroxyproline
  MOD_RES (18)..(18): Hydroxyproline
  MOD_RES (21)..(21): Hydroxyproline
  MOD_RES (24)..(24): Hydroxyproline
  MOD_RES (27)..(27): Hydroxyproline
XGPPGPPGPPGPPGPPGPPGPPGPPGPP

SEQ ID NO: 202 - protein, 28 aa, Artificial Sequence
  Description of Artificial Sequence: Synthetic peptide
  MOD_RES (1)..(1): 6-aminohexanoic acid
  MOD_RES (3)..(3): Hydroxyproline
  MOD_RES (6)..(6): Hydroxyproline
  MOD_RES (9)..(9): Hydroxyproline
  MOD_RES (12)..(12): Hydroxyproline
  MOD_RES (15)..(15): Hydroxyproline
  MOD_RES (18)..(18): Hydroxyproline
  MOD_RES (21)..(21): Hydroxyproline
  MOD_RES (24)..(24): Hydroxyproline
  MOD_RES (27)..(27): Hydroxyproline
XGPPGPPGPPGPPGPPGPPGPPGPPGPP

SEQ ID NO: 203 - protein, 28 aa, Artificial Sequence
  Description of Artificial Sequence: Synthetic peptide
  MOD_RES (1)..(1): 6-aminohexanoic acid
  MOD_RES (3)..(3): Hydroxyproline
  MOD_RES (6)..(6): Hydroxyproline
  MOD_RES (9)..(9): Hydroxyproline
  MOD_RES (12)..(12): Hydroxyproline
  MOD_RES (15)..(15): Hydroxyproline
  MOD_RES (18)..(18): Hydroxyproline
  MOD_RES (21)..(21): Hydroxyproline
  MOD_RES (24)..(24): Hydroxyproline
  MOD_RES (27)..(27): Hydroxyproline
XGPPGPPGPPGPPGPPGPPGPPGPPGPP

SEQ ID NO: 204 - protein, 28 aa, Artificial Sequence
  Description of Artificial Sequence: Synthetic peptide
  MOD_RES (1)..(1): 6-aminohexanoic acid
  MOD_RES (3)..(3): Hydroxyproline
  MOD_RES (6)..(6): Hydroxyproline
  MOD_RES (9)..(9): Hydroxyproline
  MOD_RES (12)..(12): Hydroxyproline
  MOD_RES (15)..(15): Hydroxyproline
  MOD_RES (18)..(18): Hydroxyproline
  MOD_RES (21)..(21): Hydroxyproline
  MOD_RES (24)..(24): Hydroxyproline
  MOD_RES (27)..(27): Hydroxyproline
XGPPGPPGPPGPPGPPGPPGPPGPPGPP

SEQ ID NO: 205 - protein, 28 aa, Artificial Sequence
  Description of Artificial Sequence: Synthetic peptide
  MOD_RES (1)..(1): 6-aminohexanoic acid
  MOD_RES (3)..(3): Hydroxyproline
  MOD_RES (6)..(6): Hydroxyproline
  MOD_RES (9)..(9): Hydroxyproline
  MOD_RES (12)..(12): Hydroxyproline
  MOD_RES (15)..(15): Hydroxyproline
  MOD_RES (18)..(18): Hydroxyproline
  MOD_RES (21)..(21): Hydroxyproline
  MOD_RES (24)..(24): Hydroxyproline
  MOD_RES (27)..(27): Hydroxyproline
XGPPGPPGPPGPPGPPGPPGPPGPPGPP

SEQ ID NO: 206 - protein, 28 aa, Artificial Sequence
  Description of Artificial Sequence: Synthetic peptide
  MOD_RES (1)..(1): 6-aminohexanoic acid
  MOD_RES (3)..(3): Hydroxyproline
  MOD_RES (6)..(6): Hydroxyproline
  MOD_RES (9)..(9): Hydroxyproline
  MOD_RES (12)..(12): Hydroxyproline
  MOD_RES (15)..(15): Hydroxyproline
  MOD_RES (18)..(18): Hydroxyproline
  MOD_RES (21)..(21): Hydroxyproline
  MOD_RES (24)..(24): Hydroxyproline
  MOD_RES (27)..(27): Hydroxyproline
XGPPGPPGPPGPPGPPGPPGPPGPPGPP

SEQ ID NO: 207 - protein, 28 aa, Artificial Sequence
  Description of Artificial Sequence: Synthetic peptide
  MOD_RES (1)..(1): 6-aminohexanoic acid
  MOD_RES (3)..(3): Hydroxyproline
  MOD_RES (6)..(6): Hydroxyproline
  MOD_RES (9)..(9): Hydroxyproline
  MOD_RES (12)..(12): Hydroxyproline
  MOD_RES (15)..(15): Hydroxyproline
  MOD_RES (18)..(18): Hydroxyproline
  MOD_RES (21)..(21): Hydroxyproline
  MOD_RES (24)..(24): Hydroxyproline
  MOD_RES (27)..(27): Hydroxyproline
XGPPGPPGPPGPPGPPGPPGPPGPPGPP

SEQ ID NO: 208 - protein, 28 aa, Artificial Sequence
  Description of Artificial Sequence: Synthetic peptide
  MOD_RES (1)..(1): 6-aminohexanoic acid
  MOD_RES (3)..(3): Hydroxyproline
  MOD_RES (6)..(6): Hydroxyproline
  MOD_RES (9)..(9): Hydroxyproline
  MOD_RES (12)..(12): Hydroxyproline
  MOD_RES (15)..(15): Hydroxyproline
  MOD_RES (18)..(18): Hydroxyproline
  MOD_RES (21)..(21): Hydroxyproline
  MOD_RES (24)..(24): Hydroxyproline
  MOD_RES (27)..(27): Hydroxyproline
XGPPGPPGPPGPPGPPGPPGPPGPPGPP

SEQ ID NO: 209 - protein, 28 aa, Artificial Sequence
  Description of Artificial Sequence: Synthetic peptide
  MOD_RES (1)..(1): 6-aminohexanoic acid
  MOD_RES (3)..(3): Hydroxyproline
  MOD_RES (6)..(6): Hydroxyproline
  MOD_RES (9)..(9): Hydroxyproline
  MOD_RES (12)..(12): Hydroxyproline
  MOD_RES (15)..(15): Hydroxyproline
  MOD_RES (18)..(18): Hydroxyproline
  MOD_RES (21)..(21): Hydroxyproline
  MOD_RES (24)..(24): Hydroxyproline
  MOD_RES (27)..(27): Hydroxyproline
XGPPGPPGPPGPPGPPGPPGPPGPPGPP

SEQ ID NO: 210 - protein, 28 aa, Artificial Sequence
  Description of Artificial Sequence: Synthetic peptide
  MOD_RES (1)..(1): 6-aminohexanoic acid
  MOD_RES (3)..(3): Hydroxyproline
  MOD_RES (6)..(6): Hydroxyproline
  MOD_RES (9)..(9): Hydroxyproline
  MOD_RES (12)..(12): Hydroxyproline
  MOD_RES (15)..(15): Hydroxyproline
  MOD_RES (18)..(18): Hydroxyproline
  MOD_RES (21)..(21): Hydroxyproline
  MOD_RES (24)..(24): Hydroxyproline
  MOD_RES (27)..(27): Hydroxyproline
XGPPGPPGPPGPPGPPGPPGPPGPPGPP

SEQ ID NO: 211 - protein, 28 aa, Artificial Sequence
  Description of Artificial Sequence: Synthetic peptide
  MOD_RES (1)..(1): 6-aminohexanoic acid
  MOD_RES (3)..(3): Hydroxyproline
  MOD_RES (6)..(6): Hydroxyproline
  MOD_RES (9)..(9): Hydroxyproline
  MOD_RES (12)..(12): Hydroxyproline
  MOD_RES (15)..(15): Hydroxyproline
  MOD_RES (18)..(18): Hydroxyproline
  MOD_RES (21)..(21): Hydroxyproline
  MOD_RES (24)..(24): Hydroxyproline
  MOD_RES (27)..(27): Hydroxyproline
XGPPGPPGPPGPPGPPGPPGPPGPPGPP

SEQ ID NO: 212 - protein, 28 aa, Artificial Sequence
  Description of Artificial Sequence: Synthetic peptide
  MOD_RES (1)..(1): 6-aminohexanoic acid
  MOD_RES (3)..(3): Hydroxyproline
  MOD_RES (6)..(6): Hydroxyproline
  MOD_RES (9)..(9): Hydroxyproline
  MOD_RES (12)..(12): Hydroxyproline
  MOD_RES (15)..(15): Hydroxyproline
  MOD_RES (18)..(18): Hydroxyproline
  MOD_RES (21)..(21): Hydroxyproline
  MOD_RES (24)..(24): Hydroxyproline
  MOD_RES (27)..(27): Hydroxyproline
XGPPGPPGPPGPPGPPGPPGPPGPPGPP

SEQ ID NO: 213 - protein, 28 aa, Artificial Sequence
  Description of Artificial Sequence: Synthetic peptide
  MOD_RES (1)..(1): 6-aminohexanoic acid
  MOD_RES (3)..(3): Hydroxyproline
  MOD_RES (6)..(6): Hydroxyproline
  MOD_RES (9)..(9): Hydroxyproline
  MOD_RES (12)..(12): Hydroxyproline
  MOD_RES (15)..(15): Hydroxyproline
  MOD_RES (18)..(18): Hydroxyproline
  MOD_RES (21)..(21): Hydroxyproline
  MOD_RES (24)..(24): Hydroxyproline
  MOD_RES (27)..(27): Hydroxyproline
XGPPGPPGPPGPPGPPGPPGPPGPPGPP

SEQ ID NO: 214 - protein, 28 aa, Artificial Sequence
  Description of Artificial Sequence: Synthetic peptide
  MOD_RES (1)..(1): 6-aminohexanoic acid
  MOD_RES (3)..(3): Hydroxyproline
  MOD_RES (6)..(6): Hydroxyproline
  MOD_RES (9)..(9): Hydroxyproline
  MOD_RES (12)..(12): Hydroxyproline
  MOD_RES (15)..(15): Hydroxyproline
  MOD_RES (18)..(18): Hydroxyproline
  MOD_RES (21)..(21): Hydroxyproline
  MOD_RES (24)..(24): Hydroxyproline
  MOD_RES (27)..(27): Hydroxyproline
XGPPGPPGPPGPPGPPGPPGPPGPPGPP

SEQ ID NO: 215 - protein, 28 aa, Artificial Sequence
  Description of Artificial Sequence: Synthetic peptide
  MOD_RES (1)..(1): 6-aminohexanoic acid
  MOD_RES (3)..(3): Hydroxyproline
  MOD_RES (6)..(6): Hydroxyproline
  MOD_RES (9)..(9): Hydroxyproline
  MOD_RES (12)..(12): Hydroxyproline
  MOD_RES (15)..(15): Hydroxyproline
  MOD_RES (18)..(18): Hydroxyproline
  MOD_RES (21)..(21): Hydroxyproline
  MOD_RES (24)..(24): Hydroxyproline
  MOD_RES (27)..(27): Hydroxyproline
XGPPGPPGPPGPPGPPGPPGPPGPPGPP

SEQ ID NO: 216 - protein, 28 aa, Artificial Sequence
  Description of Artificial Sequence: Synthetic peptide
  MOD_RES (1)..(1): 6-aminohexanoic acid
  MOD_RES (3)..(3): Hydroxyproline
  MOD_RES (6)..(6): Hydroxyproline
  MOD_RES (9)..(9): Hydroxyproline
  MOD_RES (12)..(12): Hydroxyproline
  MOD_RES (15)..(15): Hydroxyproline
  MOD_RES (18)..(18): Hydroxyproline
  MOD_RES (21)..(21): Hydroxyproline
  MOD_RES (24)..(24): Hydroxyproline
  MOD_RES (27)..(27): Hydroxyproline
XGPPGPPGPPGPPGPPGPPGPPGPPGPP

SEQ ID NO: 217 - protein, 28 aa, Artificial Sequence
  Description of Artificial Sequence: Synthetic peptide
  MOD_RES (1)..(1): 6-aminohexanoic acid
  MOD_RES (3)..(3): Hydroxyproline
  MOD_RES (6)..(6): Hydroxyproline
  MOD_RES (9)..(9): Hydroxyproline
  MOD_RES (12)..(12): Hydroxyproline
  MOD_RES (15)..(15): Hydroxyproline
  MOD_RES (18)..(18): Hydroxyproline
  MOD_RES (21)..(21): Hydroxyproline
  MOD_RES (24)..(24): Hydroxyproline
  MOD_RES (27)..(27): Hydroxyproline
XGPPGPPGPPGPPGPPGPPGPPGPPGPP

SEQ ID NO: 218 - protein, 28 aa, Artificial Sequence
  Description of Artificial Sequence: Synthetic peptide
  MOD_RES (1)..(1): 6-aminohexanoic acid
  MOD_RES (3)..(3): Hydroxyproline
  MOD_RES (6)..(6): Hydroxyproline
  MOD_RES (9)..(9): Hydroxyproline
  MOD_RES (12)..(12): Hydroxyproline
  MOD_RES (15)..(15): Hydroxyproline
  MOD_RES (18)..(18): Hydroxyproline
  MOD_RES (21)..(21): Hydroxyproline
  MOD_RES (24)..(24): Hydroxyproline
  MOD_RES (27)..(27): Hydroxyproline
XGPPGPPGPPGPPGPPGPPGPPGPPGPP

SEQ ID NO: 219 - protein, 28 aa, Artificial Sequence
  Description of Artificial Sequence: Synthetic peptide
  MOD_RES (1)..(1): 6-aminohexanoic acid
  MOD_RES (3)..(3): Hydroxyproline
  MOD_RES (6)..(6): Hydroxyproline
  MOD_RES (9)..(9): Hydroxyproline
  MOD_RES (12)..(12): Hydroxyproline
  MOD_RES (15)..(15): Hydroxyproline
  MOD_RES (18)..(18): Hydroxyproline
  MOD_RES (21)..(21): Hydroxyproline
  MOD_RES (24)..(24): Hydroxyproline
  MOD_RES (27)..(27): Hydroxyproline
XGPPGPPGPPGPPGPPGPPGPPGPPGPP

SEQ ID NO: 220 - protein, 28 aa, Artificial Sequence
  Description of Artificial Sequence: Synthetic peptide
  MOD_RES (1)..(1): 6-aminohexanoic acid
  MOD_RES (3)..(3): Hydroxyproline
  MOD_RES (6)..(6): Hydroxyproline
  MOD_RES (9)..(9): Hydroxyproline
  MOD_RES (12)..(12): Hydroxyproline
  MOD_RES (15)..(15): Hydroxyproline
  MOD_RES (18)..(18): Hydroxyproline
  MOD_RES (21)..(21): Hydroxyproline
  MOD_RES (24)..(24): Hydroxyproline
  MOD_RES (27)..(27): Hydroxyproline
XGPPGPPGPPGPPGPPGPPGPPGPPGPP

SEQ ID NO: 221 - protein, 28 aa, Artificial Sequence
  Description of Artificial Sequence: Synthetic peptide
  MOD_RES (1)..(1): 6-aminohexanoic acid
  MOD_RES (3)..(3): Hydroxyproline
  MOD_RES (6)..(6): Hydroxyproline
  MOD_RES (9)..(9): Hydroxyproline
  MOD_RES (12)..(12): Hydroxyproline
  MOD_RES (15)..(15): Hydroxyproline
  MOD_RES (18)..(18): Hydroxyproline
  MOD_RES (21)..(21): Hydroxyproline
  MOD_RES (24)..(24): Hydroxyproline
  MOD_RES (27)..(27): Hydroxyproline
XGPPGPPGPPGPPGPPGPPGPPGPPGPP

SEQ ID NO: 222 - protein, 28 aa, Artificial Sequence
  Description of Artificial Sequence: Synthetic peptide
  MOD_RES (1)..(1): 6-aminohexanoic acid
  MOD_RES (3)..(3): Hydroxyproline
  MOD_RES (6)..(6): Hydroxyproline
  MOD_RES (9)..(9): Hydroxyproline
  MOD_RES (12)..(12): Hydroxyproline
  MOD_RES (15)..(15): Hydroxyproline
  MOD_RES (18)..(18): Hydroxyproline
  MOD_RES (21)..(21): Hydroxyproline
  MOD_RES (24)..(24): Hydroxyproline
  MOD_RES (27)..(27): Hydroxyproline
XGPPGPPGPPGPPGPPGPPGPPGPPGPP

SEQ ID NO: 223 - protein, 28 aa, Artificial Sequence
  Description of Artificial Sequence: Synthetic peptide
  MOD_RES (1)..(1): 6-aminohexanoic acid
  MOD_RES (3)..(3): Hydroxyproline
  MOD_RES (6)..(6): Hydroxyproline
  MOD_RES (9)..(9): Hydroxyproline
  MOD_RES (12)..(12): Hydroxyproline
  MOD_RES (15)..(15): Hydroxyproline
  MOD_RES (18)..(18): Hydroxyproline
  MOD_RES (21)..(21): Hydroxyproline
  MOD_RES (24)..(24): Hydroxyproline
  MOD_RES (27)..(27): Hydroxyproline
XGPPGPPGPPGPPGPPGPPGPPGPPGPP

SEQ ID NO: 224 - protein, 28 aa, Artificial Sequence
  Description of Artificial Sequence: Synthetic peptide
  MOD_RES (1)..(1): 6-aminohexanoic acid
  MOD_RES (3)..(3): Hydroxyproline
  MOD_RES (6)..(6): Hydroxyproline
  MOD_RES (9)..(9): Hydroxyproline
  MOD_RES (12)..(12): Hydroxyproline
  MOD_RES (15)..(15): Hydroxyproline
  MOD_RES (18)..(18): Hydroxyproline
  MOD_RES (21)..(21): Hydroxyproline
  MOD_RES (24)..(24): Hydroxyproline
  MOD_RES (27)..(27): Hydroxyproline
XGPPGPPGPPGPPGPPGPPGPPGPPGPP

SEQ ID NO: 225 - protein, 28 aa, Artificial Sequence
  Description of Artificial Sequence: Synthetic peptide
  MOD_RES (1)..(1): 6-aminohexanoic acid
  MOD_RES (3)..(3): Hydroxyproline
  MOD_RES (6)..(6): Hydroxyproline
  MOD_RES (9)..(9): Hydroxyproline
  MOD_RES (12)..(12): Hydroxyproline
  MOD_RES (15)..(15): Hydroxyproline
  MOD_RES (18)..(18): Hydroxyproline
  MOD_RES (21)..(21): Hydroxyproline
  MOD_RES (24)..(24): Hydroxyproline
  MOD_RES (27)..(27): Hydroxyproline
XGPPGPPGPPGPPGPPGPPGPPGPPGPP

SEQ ID NO: 226 - protein, 30 aa, Artificial Sequence; identical to SEQ ID NO: 1
  Description of Artificial Sequence: Synthetic polypeptide

SEQ ID NO: 227 - protein, 30 aa, Artificial Sequence; identical to SEQ ID NO: 1
  Description of Artificial Sequence: Synthetic polypeptide

SEQ ID NO: 228 - protein, 30 aa, Artificial Sequence; identical to SEQ ID NO: 1
  Description of Artificial Sequence: Synthetic polypeptide

SEQ ID NO: 229 - protein, 30 aa, Artificial Sequence; identical to SEQ ID NO: 1
  Description of Artificial Sequence: Synthetic polypeptide

SEQ ID NO: 230 - protein, 30 aa, Artificial Sequence; identical to SEQ ID NO: 1
  Description of Artificial Sequence: Synthetic polypeptide

SEQ ID NO: 231 - protein, 30 aa, Artificial Sequence; identical to SEQ ID NO: 1
  Description of Artificial Sequence: Synthetic polypeptide

SEQ ID NO: 232 - protein, 30 aa, Artificial Sequence; identical to SEQ ID NO: 1
  Description of Artificial Sequence: Synthetic polypeptide

SEQ ID NO: 233 - protein, 30 aa, Artificial Sequence; identical to SEQ ID NO: 1
  Description of Artificial Sequence: Synthetic polypeptide

SEQ ID NO: 234 - protein, 30 aa, Artificial Sequence; identical to SEQ ID NO: 1
  Description of Artificial Sequence: Synthetic polypeptide

SEQ ID NO: 235 - protein, 30 aa, Artificial Sequence; identical to SEQ ID NO: 1
  Description of Artificial Sequence: Synthetic polypeptide

SEQ ID NO: 236 - protein, 30 aa, Artificial Sequence; identical to SEQ ID NO: 1
  Description of Artificial Sequence: Synthetic polypeptide

SEQ ID NO: 237 - protein, 30 aa, Artificial Sequence; identical to SEQ ID NO: 1
  Description of Artificial Sequence: Synthetic polypeptide

SEQ ID NO: 238 - protein, 30 aa, Artificial Sequence; identical to SEQ ID NO: 1
  Description of Artificial Sequence: Synthetic polypeptide

SEQ ID NO: 239 - protein, 30 aa, Artificial Sequence; identical to SEQ ID NO: 1
  Description of Artificial Sequence: Synthetic polypeptide

SEQ ID NO: 240 - protein, 30 aa, Artificial Sequence; identical to SEQ ID NO: 1
  Description of Artificial Sequence: Synthetic polypeptide

SEQ ID NO: 241 - protein, 30 aa, Artificial Sequence; identical to SEQ ID NO: 1
  Description of Artificial Sequence: Synthetic polypeptide

SEQ ID NO: 242 - protein, 30 aa, Artificial Sequence; identical to SEQ ID NO: 1
  Description of Artificial Sequence: Synthetic polypeptide

SEQ ID NO: 243 - protein, 30 aa, Artificial Sequence; identical to SEQ ID NO: 1
  Description of Artificial Sequence: Synthetic polypeptide

SEQ ID NO: 244 - protein, 30 aa, Artificial Sequence; identical to SEQ ID NO: 1
  Description of Artificial Sequence: Synthetic polypeptide

SEQ ID NO: 245 - protein, 30 aa, Artificial Sequence; identical to SEQ ID NO: 1
  Description of Artificial Sequence: Synthetic polypeptide

SEQ ID NO: 246 - protein, 30 aa, Artificial Sequence; identical to SEQ ID NO: 1
  Description of Artificial Sequence: Synthetic polypeptide

SEQ ID NO: 247 - protein, 30 aa, Artificial Sequence; identical to SEQ ID NO: 1
  Description of Artificial Sequence: Synthetic polypeptide

SEQ ID NO: 248 - protein, 30 aa, Artificial Sequence; identical to SEQ ID NO: 1
  Description of Artificial Sequence: Synthetic polypeptide

SEQ ID NO: 249 - protein, 30 aa, Artificial Sequence; identical to SEQ ID NO: 1
  Description of Artificial Sequence: Synthetic polypeptide

SEQ ID NO: 250 - protein, 30 aa, Artificial Sequence; identical to SEQ ID NO: 1
  Description of Artificial Sequence: Synthetic polypeptide

SEQ ID NO: 251 - protein, 30 aa, Artificial Sequence; identical to SEQ ID NO: 1
  Description of Artificial Sequence: Synthetic polypeptide

SEQ ID NO: 252 - protein, 30 aa, Artificial Sequence; identical to SEQ ID NO: 1
  Description of Artificial Sequence: Synthetic polypeptide

SEQ ID NO: 253 - protein, 30 aa, Artificial Sequence; identical to SEQ ID NO: 1
  Description of Artificial Sequence: Synthetic polypeptide

SEQ ID NO: 254 - protein, 28 aa, Artificial Sequence
  Description of Artificial Sequence: Synthetic peptide
  MOD_RES (1)..(1): 6-aminohexanoic acid
XGPPGPPGPPGPPGPPGPPGPPGPPGPP

SEQ ID NO: 255 - protein, 28 aa, Artificial Sequence
  Description of Artificial Sequence: Synthetic peptide
  MOD_RES (1)..(1): 6-aminohexanoic acid
XGPPGPPGPPGPPGPPGPPGPPGPPGPP

SEQ ID NO: 256 - protein, 28 aa, Artificial Sequence
  Description of Artificial Sequence: Synthetic peptide
  MOD_RES (1)..(1): 6-aminohexanoic acid
XGPPGPPGPPGPPGPPGPPGPPGPPGPP

SEQ ID NO: 257 - protein, 28 aa, Artificial Sequence
  Description of Artificial Sequence: Synthetic peptide
  MOD_RES (1)..(1): 6-aminohexanoic acid
XGPPGPPGPPGPPGPPGPPGPPGPPGPP

SEQ ID NO: 258 - protein, 28 aa, Artificial Sequence
  Description of Artificial Sequence: Synthetic peptide
  MOD_RES (1)..(1): 6-aminohexanoic acid
XGPPGPPGPPGPPGPPGPPGPPGPPGPP

SEQ ID NO: 259 - protein, 28 aa, Artificial Sequence
  Description of Artificial Sequence: Synthetic peptide
  MOD_RES (1)..(1): 6-aminohexanoic acid
XGPPGPPGPPGPPGPPGPPGPPGPPGPP

SEQ ID NO: 260 - protein, 28 aa, Artificial Sequence
  Description of Artificial Sequence: Synthetic peptide
  MOD_RES (1)..(1): 6-aminohexanoic acid
XGPPGPPGPPGPPGPPGPPGPPGPPGPP

SEQ ID NO: 261 - protein, 28 aa, Artificial Sequence
  Description of Artificial Sequence: Synthetic peptide
  MOD_RES (1)..(1): 6-aminohexanoic acid
XGPPGPPGPPGPPGPPGPPGPPGPPGPP

SEQ ID NO: 262 - protein, 28 aa, Artificial Sequence
  Description of Artificial Sequence: Synthetic peptide
  MOD_RES (1)..(1): 6-aminohexanoic acid
XGPPGPPGPPGPPGPPGPPGPPGPPGPP

SEQ ID NO: 263 - protein, 28 aa, Artificial Sequence
  Description of Artificial Sequence: Synthetic peptide
  MOD_RES (1)..(1): 6-aminohexanoic acid
XGPPGPPGPPGPPGPPGPPGPPGPPGPP

SEQ ID NO: 264 - protein, 28 aa, Artificial Sequence
  Description of Artificial Sequence: Synthetic peptide
  MOD_RES (1)..(1): 6-aminohexanoic acid
XGPPGPPGPPGPPGPPGPPGPPGPPGPP

SEQ ID NO: 265 - protein, 28 aa, Artificial Sequence
  Description of Artificial Sequence: Synthetic peptide
  MOD_RES (1)..(1): 6-aminohexanoic acid
XGPPGPPGPPGPPGPPGPPGPPGPPGPP

SEQ ID NO: 266 - protein, 28 aa, Artificial Sequence
  Description of Artificial Sequence: Synthetic peptide
  MOD_RES (1)..(1): 6-aminohexanoic acid
XGPPGPPGPPGPPGPPGPPGPPGPPGPP

SEQ ID NO: 267 - protein, 28 aa, Artificial Sequence
  Description of Artificial Sequence: Synthetic peptide
  MOD_RES (1)..(1): 6-aminohexanoic acid
XGPPGPPGPPGPPGPPGPPGPPGPPGPP

SEQ ID NO: 268 - protein, 28 aa, Artificial Sequence
  Description of Artificial Sequence: Synthetic peptide
  MOD_RES (1)..(1): 6-aminohexanoic acid
XGPPGPPGPPGPPGPPGPPGPPGPPGPP

SEQ ID NO: 269 - protein, 28 aa, Artificial Sequence
  Description of Artificial Sequence: Synthetic peptide
  MOD_RES (1)..(1): 6-aminohexanoic acid
XGPPGPPGPPGPPGPPGPPGPPGPPGPP

SEQ ID NO: 270 - protein, 28 aa, Artificial Sequence
  Description of Artificial Sequence: Synthetic peptide
  MOD_RES (1)..(1): 6-aminohexanoic acid
XGPPGPPGPPGPPGPPGPPGPPGPPGPP

SEQ ID NO: 271 - protein, 28 aa, Artificial Sequence
  Description of Artificial Sequence: Synthetic peptide
  MOD_RES (1)..(1): 6-aminohexanoic acid
XGPPGPPGPPGPPGPPGPPGPPGPPGPP

SEQ ID NO: 272 - protein, 28 aa, Artificial Sequence
  Description of Artificial Sequence: Synthetic peptide
  MOD_RES (1)..(1): 6-aminohexanoic acid
XGPPGPPGPPGPPGPPGPPGPPGPPGPP

SEQ ID NO: 273 - protein, 28 aa, Artificial Sequence
  Description of Artificial Sequence: Synthetic peptide
  MOD_RES (1)..(1): 6-aminohexanoic acid
XGPPGPPGPPGPPGPPGPPGPPGPPGPP

SEQ ID NO: 274 - protein, 28 aa, Artificial Sequence
  Description of Artificial Sequence: Synthetic peptide
  MOD_RES (1)..(1): 6-aminohexanoic acid
XGPPGPPGPPGPPGPPGPPGPPGPPGPP

SEQ ID NO: 275 - protein, 28 aa, Artificial Sequence
  Description of Artificial Sequence: Synthetic peptide
  MOD_RES (1)..(1): 6-aminohexanoic acid
XGPPGPPGPPGPPGPPGPPGPPGPPGPP

SEQ ID NO: 276 - protein, 28 aa, Artificial Sequence
  Description of Artificial Sequence: Synthetic peptide
  MOD_RES (1)..(1): 6-aminohexanoic acid
XGPPGPPGPPGPPGPPGPPGPPGPPGPP

SEQ ID NO: 277 - protein, 28 aa, Artificial Sequence
  Description of Artificial Sequence: Synthetic peptide
  MOD_RES (1)..(1): 6-aminohexanoic acid
XGPPGPPGPPGPPGPPGPPGPPGPPGPP

SEQ ID NO: 278 - protein, 28 aa, Artificial Sequence
  Description of Artificial Sequence: Synthetic peptide
  MOD_RES (1)..(1): 6-aminohexanoic acid
XGPPGPPGPPGPPGPPGPPGPPGPPGPP

SEQ ID NO: 279 - protein, 28 aa, Artificial Sequence
  Description of Artificial Sequence: Synthetic peptide
  MOD_RES (1)..(1): 6-aminohexanoic acid
XGPPGPPGPPGPPGPPGPPGPPGPPGPP

SEQ ID NO: 280 - protein, 28 aa, Artificial Sequence
  Description of Artificial Sequence: Synthetic peptide
  MOD_RES (1)..(1): 6-aminohexanoic acid
XGPPGPPGPPGPPGPPGPPGPPGPPGPP

SEQ ID NO: 281 - protein, 28 aa, Artificial Sequence
  Description of Artificial Sequence: Synthetic peptide
  MOD_RES (1)..(1): 6-aminohexanoic acid
XGPPGPPGPPGPPGPPGPPGPPGPPGPP

SEQ ID NO: 282 - protein, 30 aa, Artificial Sequence; identical to SEQ ID NO: 1
  Description of Artificial Sequence: Synthetic polypeptide
  MOD_RES (6)..(6): 2S, 4R-4-fluoroproline
  MOD_RES (9)..(9): 2S, 4R-4-fluoroproline
  MOD_RES (12)..(12): 2S, 4R-4-fluoroproline
  MOD_RES (15)..(15): 2S, 4R-4-fluoroproline
  MOD_RES (18)..(18): 2S, 4R-4-fluoroproline
  MOD_RES (21)..(21): 2S, 4R-4-fluoroproline
  MOD_RES (24)..(24): 2S, 4R-4-fluoroproline
  MOD_RES (27)..(27): 2S, 4R-4-fluoroproline
  MOD_RES (30)..(30): 2S, 4R-4-fluoroproline

SEQ ID NO: 283 - protein, 30 aa, Artificial Sequence; identical to SEQ ID NO: 1
  Description of Artificial Sequence: Synthetic polypeptide
  MOD_RES (6)..(6): 2S, 4R-4-fluoroproline
  MOD_RES (9)..(9): 2S, 4R-4-fluoroproline
  MOD_RES (12)..(12): 2S, 4R-4-fluoroproline
  MOD_RES (15)..(15): 2S, 4R-4-fluoroproline
  MOD_RES (18)..(18): 2S, 4R-4-fluoroproline
  MOD_RES (21)..(21): 2S, 4R-4-fluoroproline
  MOD_RES (24)..(24): 2S, 4R-4-fluoroproline
  MOD_RES (27)..(27): 2S, 4R-4-fluoroproline
  MOD_RES (30)..(30): 2S, 4R-4-fluoroproline

SEQ ID NO: 284 - protein, 30 aa, Artificial Sequence; identical to SEQ ID NO: 1
  Description of Artificial Sequence: Synthetic polypeptide
  MOD_RES (6)..(6): 2S, 4R-4-fluoroproline
  MOD_RES (9)..(9): 2S, 4R-4-fluoroproline
  MOD_RES (12)..(12): 2S, 4R-4-fluoroproline
  MOD_RES (15)..(15): 2S, 4R-4-fluoroproline
  MOD_RES (18)..(18): 2S, 4R-4-fluoroproline
  MOD_RES (21)..(21): 2S, 4R-4-fluoroproline
  MOD_RES (24)..(24): 2S, 4R-4-fluoroproline
  MOD_RES (27)..(27): 2S, 4R-4-fluoroproline
  MOD_RES (30)..(30): 2S, 4R-4-fluoroproline

SEQ ID NO: 285 - protein, 30 aa, Artificial Sequence; identical to SEQ ID NO: 1
  Description of Artificial Sequence: Synthetic polypeptide
  MOD_RES (6)..(6): 2S, 4R-4-fluoroproline
  MOD_RES (9)..(9): 2S, 4R-4-fluoroproline
  MOD_RES (12)..(12): 2S, 4R-4-fluoroproline
  MOD_RES (15)..(15): 2S, 4R-4-fluoroproline
  MOD_RES (18)..(18): 2S, 4R-4-fluoroproline
  MOD_RES (21)..(21): 2S, 4R-4-fluoroproline
  MOD_RES (24)..(24): 2S, 4R-4-fluoroproline
  MOD_RES (27)..(27): 2S, 4R-4-fluoroproline
  MOD_RES (30)..(30): 2S, 4R-4-fluoroproline

SEQ ID NO: 286 - protein, 30 aa, Artificial Sequence; identical to SEQ ID NO: 1
  Description of Artificial Sequence: Synthetic polypeptide
  MOD_RES (6)..(6): 2S, 4R-4-fluoroproline
  MOD_RES (9)..(9): 2S, 4R-4-fluoroproline
  MOD_RES (12)..(12): 2S, 4R-4-fluoroproline
  MOD_RES (15)..(15): 2S, 4R-4-fluoroproline
  MOD_RES (18)..(18): 2S, 4R-4-fluoroproline
  MOD_RES (21)..(21): 2S, 4R-4-fluoroproline
  MOD_RES (24)..(24): 2S, 4R-4-fluoroproline
  MOD_RES (27)..(27): 2S, 4R-4-fluoroproline
  MOD_RES (30)..(30): 2S, 4R-4-fluoroproline

SEQ ID NO: 287 - protein, 30 aa, Artificial Sequence; identical to SEQ ID NO: 1
  Description of Artificial Sequence: Synthetic polypeptide
  MOD_RES (6)..(6): 2S, 4R-4-fluoroproline
  MOD_RES (9)..(9): 2S, 4R-4-fluoroproline
  MOD_RES (12)..(12): 2S, 4R-4-fluoroproline
  MOD_RES (15)..(15): 2S, 4R-4-fluoroproline
  MOD_RES (18)..(18): 2S, 4R-4-fluoroproline
  MOD_RES (21)..(21): 2S, 4R-4-fluoroproline
  MOD_RES (24)..(24): 2S, 4R-4-fluoroproline
  MOD_RES (27)..(27): 2S, 4R-4-fluoroproline
  MOD_RES (30)..(30): 2S, 4R-4-fluoroproline

SEQ ID NO: 288 - protein, 30 aa, Artificial Sequence; identical to SEQ ID NO: 1
  Description of Artificial Sequence: Synthetic polypeptide
  MOD_RES (6)..(6): 2S, 4R-4-fluoroproline
  MOD_RES (9)..(9): 2S, 4R-4-fluoroproline
  MOD_RES (12)..(12): 2S, 4R-4-fluoroproline
  MOD_RES (15)..(15): 2S, 4R-4-fluoroproline
  MOD_RES (18)..(18): 2S, 4R-4-fluoroproline
  MOD_RES (21)..(21): 2S, 4R-4-fluoroproline
  MOD_RES (24)..(24): 2S, 4R-4-fluoroproline
  MOD_RES (27)..(27): 2S, 4R-4-fluoroproline
  MOD_RES (30)..(30): 2S, 4R-4-fluoroproline

SEQ ID NO: 289 - protein, 30 aa, Artificial Sequence; identical to SEQ ID NO: 1
  Description of Artificial Sequence: Synthetic polypeptide
  MOD_RES (6)..(6): 2S, 4R-4-fluoroproline
  MOD_RES (9)..(9): 2S, 4R-4-fluoroproline
  MOD_RES (12)..(12): 2S, 4R-4-fluoroproline
  MOD_RES (15)..(15): 2S, 4R-4-fluoroproline
  MOD_RES (18)..(18): 2S, 4R-4-fluoroproline
  MOD_RES (21)..(21): 2S, 4R-4-fluoroproline
  MOD_RES (24)..(24): 2S, 4R-4-fluoroproline
  MOD_RES (27)..(27): 2S, 4R-4-fluoroproline
  MOD_RES (30)..(30): 2S, 4R-4-fluoroproline

SEQ ID NO: 290 - protein, 30 aa, Artificial Sequence; identical to SEQ ID NO: 1
  Description of Artificial Sequence: Synthetic polypeptide
  MOD_RES (6)..(6): 2S, 4R-4-fluoroproline
  MOD_RES (9)..(9): 2S, 4R-4-fluoroproline
  MOD_RES (12)..(12): 2S, 4R-4-fluoroproline
  MOD_RES (15)..(15): 2S, 4R-4-fluoroproline
  MOD_RES (18)..(18): 2S, 4R-4-fluoroproline
  MOD_RES (21)..(21): 2S, 4R-4-fluoroproline
  MOD_RES (24)..(24): 2S, 4R-4-fluoroproline
  MOD_RES (27)..(27): 2S, 4R-4-fluoroproline
  MOD_RES (30)..(30): 2S, 4R-4-fluoroproline

SEQ ID NO: 291 - protein, 30 aa, Artificial Sequence; identical to SEQ ID NO: 1
  Description of Artificial Sequence: Synthetic polypeptide
  MOD_RES (6)..(6): 2S, 4R-4-fluoroproline
  MOD_RES (9)..(9): 2S, 4R-4-fluoroproline
  MOD_RES (12)..(12): 2S, 4R-4-fluoroproline
  MOD_RES (15)..(15): 2S, 4R-4-fluoroproline
  MOD_RES (18)..(18): 2S, 4R-4-fluoroproline
  MOD_RES (21)..(21): 2S, 4R-4-fluoroproline
  MOD_RES (24)..(24): 2S, 4R-4-fluoroproline
  MOD_RES (27)..(27): 2S, 4R-4-fluoroproline
  MOD_RES (30)..(30): 2S, 4R-4-fluoroproline

SEQ ID NO: 292 - protein, 30 aa, Artificial Sequence; identical to SEQ ID NO: 1
  Description of Artificial Sequence: Synthetic polypeptide
  MOD_RES (6)..(6): 2S, 4R-4-fluoroproline
  MOD_RES (9)..(9): 2S, 4R-4-fluoroproline
  MOD_RES (12)..(12): 2S, 4R-4-fluoroproline
  MOD_RES (15)..(15): 2S, 4R-4-fluoroproline
  MOD_RES (18)..(18): 2S, 4R-4-fluoroproline
  MOD_RES (21)..(21): 2S, 4R-4-fluoroproline
  MOD_RES (24)..(24): 2S, 4R-4-fluoroproline
  MOD_RES (27)..(27): 2S, 4R-4-fluoroproline
  MOD_RES (30)..(30): 2S, 4R-4-fluoroproline

SEQ ID NO: 293 - protein, 30 aa, Artificial Sequence; identical to SEQ ID NO: 1
  Description of Artificial Sequence: Synthetic polypeptide
  MOD_RES (6)..(6): 2S, 4R-4-fluoroproline
  MOD_RES (9)..(9): 2S, 4R-4-fluoroproline
  MOD_RES (12)..(12): 2S, 4R-4-fluoroproline
  MOD_RES (15)..(15): 2S, 4R-4-fluoroproline
  MOD_RES (18)..(18): 2S, 4R-4-fluoroproline
  MOD_RES (21)..(21): 2S, 4R-4-fluoroproline
  MOD_RES (24)..(24): 2S, 4R-4-fluoroproline
  MOD_RES (27)..(27): 2S, 4R-4-fluoroproline
  MOD_RES (30)..(30): 2S, 4R-4-fluoroproline

SEQ ID NO: 294 - protein, 30 aa, Artificial Sequence; identical to SEQ ID NO: 1
  Description of Artificial Sequence: Synthetic polypeptide
  MOD_RES (6)..(6): 2S, 4R-4-fluoroproline
  MOD_RES (9)..(9): 2S, 4R-4-fluoroproline
  MOD_RES (12)..(12): 2S, 4R-4-fluoroproline
  MOD_RES (15)..(15): 2S, 4R-4-fluoroproline
  MOD_RES (18)..(18): 2S, 4R-4-fluoroproline
  MOD_RES (21)..(21): 2S, 4R-4-fluoroproline
  MOD_RES (24)..(24): 2S, 4R-4-fluoroproline
  MOD_RES (27)..(27): 2S, 4R-4-fluoroproline
  MOD_RES (30)..(30): 2S, 4R-4-fluoroproline

SEQ ID NO: 295 - protein, 30 aa, Artificial Sequence; identical to SEQ ID NO: 1
  Description of Artificial Sequence: Synthetic polypeptide
  MOD_RES (6)..(6): 2S, 4R-4-fluoroproline
  MOD_RES (9)..(9): 2S, 4R-4-fluoroproline
  MOD_RES (12)..(12): 2S, 4R-4-fluoroproline
  MOD_RES (15)..(15): 2S, 4R-4-fluoroproline
  MOD_RES (18)..(18): 2S, 4R-4-fluoroproline
  MOD_RES (21)..(21): 2S, 4R-4-fluoroproline
  MOD_RES (24)..(24): 2S, 4R-4-fluoroproline
  MOD_RES (27)..(27): 2S, 4R-4-fluoroproline
  MOD_RES (30)..(30): 2S, 4R-4-fluoroproline

SEQ ID NO: 296 - protein, 30 aa, Artificial Sequence; identical to SEQ ID NO: 1
  Description of Artificial Sequence: Synthetic polypeptide
  MOD_RES (6)..(6): 2S, 4R-4-fluoroproline
  MOD_RES (9)..(9): 2S, 4R-4-fluoroproline
  MOD_RES (12)..(12): 2S, 4R-4-fluoroproline
  MOD_RES (15)..(15): 2S, 4R-4-fluoroproline
  MOD_RES (18)..(18): 2S, 4R-4-fluoroproline
  MOD_RES (21)..(21): 2S, 4R-4-fluoroproline
  MOD_RES (24)..(24): 2S, 4R-4-fluoroproline
  MOD_RES (27)..(27): 2S, 4R-4-fluoroproline
  MOD_RES (30)..(30): 2S, 4R-4-fluoroproline

SEQ ID NO: 297 - protein, 30 aa, Artificial Sequence; identical to SEQ ID NO: 1
  Description of Artificial Sequence: Synthetic polypeptide
  MOD_RES (6)..(6): 2S, 4R-4-fluoroproline
  MOD_RES (9)..(9): 2S, 4R-4-fluoroproline
  MOD_RES (12)..(12): 2S, 4R-4-fluoroproline
  MOD_RES (15)..(15): 2S, 4R-4-fluoroproline
  MOD_RES (18)..(18): 2S, 4R-4-fluoroproline
  MOD_RES (21)..(21): 2S, 4R-4-fluoroproline
  MOD_RES (24)..(24): 2S, 4R-4-fluoroproline
  MOD_RES (27)..(27): 2S, 4R-4-fluoroproline
  MOD_RES (30)..(30): 2S, 4R-4-fluoroproline

SEQ ID NO: 298 - protein, 30 aa, Artificial Sequence; identical to SEQ ID NO: 1
  Description of Artificial Sequence: Synthetic polypeptide
  MOD_RES (6)..(6): 2S, 4R-4-fluoroproline
  MOD_RES (9)..(9): 2S, 4R-4-fluoroproline
  MOD_RES (12)..(12): 2S, 4R-4-fluoroproline
  MOD_RES (15)..(15): 2S, 4R-4-fluoroproline
  MOD_RES (18)..(18): 2S, 4R-4-fluoroproline
  MOD_RES (21)..(21): 2S, 4R-4-fluoroproline
  MOD_RES (24)..(24): 2S, 4R-4-fluoroproline
  MOD_RES (27)..(27): 2S, 4R-4-fluoroproline
  MOD_RES (30)..(30): 2S, 4R-4-fluoroproline

SEQ ID NO: 299 - protein, 30 aa, Artificial Sequence; identical to SEQ ID NO: 1
  Description of Artificial Sequence: Synthetic polypeptide
  MOD_RES (6)..(6): 2S, 4R-4-fluoroproline
  MOD_RES (9)..(9): 2S, 4R-4-fluoroproline
  MOD_RES (12)..(12): 2S, 4R-4-fluoroproline
  MOD_RES (15)..(15): 2S, 4R-4-fluoroproline
  MOD_RES (18)..(18): 2S, 4R-4-fluoroproline
  MOD_RES (21)..(21): 2S, 4R-4-fluoroproline
  MOD_RES (24)..(24): 2S, 4R-4-fluoroproline
  MOD_RES (27)..(27): 2S, 4R-4-fluoroproline
  MOD_RES (30)..(30): 2S, 4R-4-fluoroproline

SEQ ID NO: 300 - protein, 30 aa, Artificial Sequence; identical to SEQ ID NO: 1
  Description of Artificial Sequence: Synthetic polypeptide
  MOD_RES (6)..(6): 2S, 4R-4-fluoroproline
  MOD_RES (9)..(9): 2S, 4R-4-fluoroproline
  MOD_RES (12)..(12): 2S, 4R-4-fluoroproline
  MOD_RES (15)..(15): 2S, 4R-4-fluoroproline
  MOD_RES (18)..(18): 2S, 4R-4-fluoroproline
  MOD_RES (21)..(21): 2S, 4R-4-fluoroproline
  MOD_RES (24)..(24): 2S, 4R-4-fluoroproline
  MOD_RES (27)..(27): 2S, 4R-4-fluoroproline
  MOD_RES (30)..(30): 2S, 4R-4-fluoroproline

SEQ ID NO: 301 - protein, 30 aa, Artificial Sequence; identical to SEQ ID NO: 1
  Description of Artificial Sequence: Synthetic polypeptide
  MOD_RES (6)..(6): 2S, 4R-4-fluoroproline
  MOD_RES (9)..(9): 2S, 4R-4-fluoroproline
  MOD_RES (12)..(12): 2S, 4R-4-fluoroproline
  MOD_RES (15)..(15): 2S, 4R-4-fluoroproline
  MOD_RES (18)..(18): 2S, 4R-4-fluoroproline
  MOD_RES (21)..(21): 2S, 4R-4-fluoroproline
  MOD_RES (24)..(24): 2S, 4R-4-fluoroproline
  MOD_RES (27)..(27): 2S, 4R-4-fluoroproline
  MOD_RES (30)..(30): 2S, 4R-4-fluoroproline

SEQ ID NO: 302 - protein, 30 aa, Artificial Sequence; identical to SEQ ID NO: 1
  Description of Artificial Sequence: Synthetic polypeptide
  MOD_RES (6)..(6): 2S, 4R-4-fluoroproline
  MOD_RES (9)..(9): 2S, 4R-4-fluoroproline
  MOD_RES (12)..(12): 2S, 4R-4-fluoroproline
  MOD_RES (15)..(15): 2S, 4R-4-fluoroproline
  MOD_RES (18)..(18): 2S, 4R-4-fluoroproline
  MOD_RES (21)..(21): 2S, 4R-4-fluoroproline
  MOD_RES (24)..(24): 2S, 4R-4-fluoroproline
  MOD_RES (27)..(27): 2S, 4R-4-fluoroproline
  MOD_RES (30)..(30): 2S, 4R-4-fluoroproline

SEQ ID NO: 303 - protein, 30 aa, Artificial Sequence; identical to SEQ ID NO: 1
  Description of Artificial Sequence: Synthetic polypeptide
  MOD_RES (6)..(6): 2S, 4R-4-fluoroproline
  MOD_RES (9)..(9): 2S, 4R-4-fluoroproline
  MOD_RES (12)..(12): 2S, 4R-4-fluoroproline
  MOD_RES (15)..(15): 2S, 4R-4-fluoroproline
  MOD_RES (18)..(18): 2S, 4R-4-fluoroproline
  MOD_RES (21)..(21): 2S, 4R-4-fluoroproline
  MOD_RES (24)..(24): 2S, 4R-4-fluoroproline
  MOD_RES (27)..(27): 2S, 4R-4-fluoroproline
  MOD_RES (30)..(30): 2S, 4R-4-fluoroproline

SEQ ID NO: 304 - protein, 30 aa, Artificial Sequence; identical to SEQ ID NO: 1
  Description of Artificial Sequence: Synthetic polypeptide
  MOD_RES (6)..(6): 2S, 4R-4-fluoroproline
  MOD_RES (9)..(9): 2S, 4R-4-fluoroproline
  MOD_RES (12)..(12): 2S, 4R-4-fluoroproline
  MOD_RES (15)..(15): 2S, 4R-4-fluoroproline
  MOD_RES (18)..(18): 2S, 4R-4-fluoroproline
  MOD_RES (21)..(21): 2S, 4R-4-fluoroproline
  MOD_RES (24)..(24): 2S, 4R-4-fluoroproline
  MOD_RES (27)..(27): 2S, 4R-4-fluoroproline
  MOD_RES (30)..(30): 2S, 4R-4-fluoroproline

SEQ ID NO: 305 - protein, 30 aa, Artificial Sequence; identical to SEQ ID NO: 1
  Description of Artificial Sequence: Synthetic polypeptide
  MOD_RES (6)..(6): 2S, 4R-4-fluoroproline
  MOD_RES (9)..(9): 2S, 4R-4-fluoroproline
  MOD_RES (12)..(12): 2S, 4R-4-fluoroproline
  MOD_RES (15)..(15): 2S, 4R-4-fluoroproline
  MOD_RES (18)..(18): 2S, 4R-4-fluoroproline
  MOD_RES (21)..(21): 2S, 4R-4-fluoroproline
  MOD_RES (24)..(24): 2S, 4R-4-fluoroproline
  MOD_RES (27)..(27): 2S, 4R-4-fluoroproline
  MOD_RES (30)..(30): 2S, 4R-4-fluoroproline

SEQ ID NO: 306 - protein, 30 aa, Artificial Sequence; identical to SEQ ID NO: 1
  Description of Artificial Sequence: Synthetic polypeptide
  MOD_RES (6)..(6): 2S, 4R-4-fluoroproline
  MOD_RES (9)..(9): 2S, 4R-4-fluoroproline
  MOD_RES (12)..(12): 2S, 4R-4-fluoroproline
  MOD_RES (15)..(15): 2S, 4R-4-fluoroproline
  MOD_RES (18)..(18): 2S, 4R-4-fluoroproline
  MOD_RES (21)..(21): 2S, 4R-4-fluoroproline
  MOD_RES (24)..(24): 2S, 4R-4-fluoroproline
  MOD_RES (27)..(27): 2S, 4R-4-fluoroproline
  MOD_RES (30)..(30): 2S, 4R-4-fluoroproline

SEQ ID NO: 307 - protein, 30 aa, Artificial Sequence; identical to SEQ ID NO: 1
  Description of Artificial Sequence: Synthetic polypeptide
  MOD_RES (6)..(6): 2S, 4R-4-fluoroproline
  MOD_RES (9)..(9): 2S, 4R-4-fluoroproline
  MOD_RES (12)..(12): 2S, 4R-4-fluoroproline
  MOD_RES (15)..(15): 2S, 4R-4-fluoroproline
  MOD_RES (18)..(18): 2S, 4R-4-fluoroproline
  MOD_RES (21)..(21): 2S, 4R-4-fluoroproline
  MOD_RES (24)..(24): 2S, 4R-4-fluoroproline
  MOD_RES (27)..(27): 2S, 4R-4-fluoroproline
  MOD_RES (30)..(30): 2S, 4R-4-fluoroproline

SEQ ID NO: 308 - protein, 30 aa, Artificial Sequence; identical to SEQ ID NO: 1
  Description of Artificial Sequence: Synthetic polypeptide
  MOD_RES (6)..(6): 2S, 4R-4-fluoroproline
  MOD_RES (9)..(9): 2S, 4R-4-fluoroproline
  MOD_RES (12)..(12): 2S, 4R-4-fluoroproline
  MOD_RES (15)..(15): 2S, 4R-4-fluoroproline
  MOD_RES (18)..(18): 2S, 4R-4-fluoroproline
  MOD_RES (21)..(21): 2S, 4R-4-fluoroproline
  MOD_RES (24)..(24): 2S, 4R-4-fluoroproline
  MOD_RES (27)..(27): 2S, 4R-4-fluoroproline
  MOD_RES (30)..(30): 2S, 4R-4-fluoroproline

SEQ ID NO: 309 - protein, 30 aa, Artificial Sequence; identical to SEQ ID NO: 1
  Description of Artificial Sequence: Synthetic polypeptide
  MOD_RES (6)..(6): 2S, 4R-4-fluoroproline
  MOD_RES (9)..(9): 2S, 4R-4-fluoroproline
  MOD_RES (12)..(12): 2S, 4R-4-fluoroproline
  MOD_RES (15)..(15): 2S, 4R-4-fluoroproline
  MOD_RES (18)..(18): 2S, 4R-4-fluoroproline
  MOD_RES (21)..(21): 2S, 4R-4-fluoroproline
  MOD_RES (24)..(24): 2S, 4R-4-fluoroproline
  MOD_RES (27)..(27): 2S, 4R-4-fluoroproline
  MOD_RES (30)..(30): 2S, 4R-4-fluoroproline

SEQ ID NO: 310 - protein, 28 aa, Artificial Sequence
  Description of Artificial Sequence: Synthetic peptide
  MOD_RES (1)..(1): 6-aminohexanoic acid
  MOD_RES (4)..(4): 2S, 4R-4-fluoroproline
  MOD_RES (7)..(7): 2S, 4R-4-fluoroproline
  MOD_RES (10)..(10): 2S, 4R-4-fluoroproline
  MOD_RES (13)..(13): 2S, 4R-4-fluoroproline
  MOD_RES (16)..(16): 2S, 4R-4-fluoroproline
  MOD_RES (19)..(19): 2S, 4R-4-fluoroproline
  MOD_RES (22)..(22): 2S, 4R-4-fluoroproline
  MOD_RES (25)..(25): 2S, 4R-4-fluoroproline
  MOD_RES (28)..(28): 2S, 4R-4-fluoroproline
XGPPGPPGPPGPPGPPGPPGPPGPPGPP

SEQ ID NO: 311 - protein, 28 aa, Artificial Sequence
  Description of Artificial Sequence: Synthetic peptide
  MOD_RES (1)..(1): 6-aminohexanoic acid
  MOD_RES (4)..(4): 2S, 4R-4-fluoroproline
  MOD_RES (7)..(7): 2S, 4R-4-fluoroproline
  MOD_RES (10)..(10): 2S, 4R-4-fluoroproline
  MOD_RES (13)..(13): 2S, 4R-4-fluoroproline
  MOD_RES (16)..(16): 2S, 4R-4-fluoroproline
  MOD_RES (19)..(19): 2S, 4R-4-fluoroproline
  MOD_RES (22)..(22): 2S, 4R-4-fluoroproline
  MOD_RES (25)..(25): 2S, 4R-4-fluoroproline
  MOD_RES (28)..(28): 2S, 4R-4-fluoroproline
XGPPGPPGPPGPPGPPGPPGPPGPPGPP

SEQ ID NO: 312 - protein, 28 aa, Artificial Sequence
  Description of Artificial Sequence: Synthetic peptide
  MOD_RES (1)..(1): 6-aminohexanoic acid
  MOD_RES (4)..(4): 2S, 4R-4-fluoroproline
  MOD_RES (7)..(7): 2S, 4R-4-fluoroproline
  MOD_RES (10)..(10): 2S, 4R-4-fluoroproline
  MOD_RES (13)..(13): 2S, 4R-4-fluoroproline
  MOD_RES (16)..(16): 2S, 4R-4-fluoroproline
  MOD_RES (19)..(19): 2S, 4R-4-fluoroproline
  MOD_RES (22)..(22): 2S, 4R-4-fluoroproline
  MOD_RES (25)..(25): 2S, 4R-4-fluoroproline
  MOD_RES (28)..(28): 2S, 4R-4-fluoroproline
XGPPGPPGPPGPPGPPGPPGPPGPPGPP

SEQ ID NO: 313 - protein, 28 aa, Artificial Sequence
  Description of Artificial Sequence: Synthetic peptide
  MOD_RES (1)..(1): 6-aminohexanoic acid
  MOD_RES (4)..(4): 2S, 4R-4-fluoroproline
  MOD_RES (7)..(7): 2S, 4R-4-fluoroproline
  MOD_RES (10)..(10): 2S, 4R-4-fluoroproline
  MOD_RES (13)..(13): 2S, 4R-4-fluoroproline
  MOD_RES (16)..(16): 2S, 4R-4-fluoroproline
  MOD_RES (19)..(19): 2S, 4R-4-fluoroproline
  MOD_RES (22)..(22): 2S, 4R-4-fluoroproline
  MOD_RES (25)..(25): 2S, 4R-4-fluoroproline
  MOD_RES (28)..(28): 2S, 4R-4-fluoroproline
XGPPGPPGPPGPPGPPGPPGPPGPPGPP

SEQ ID NO: 314 - protein, 28 aa, Artificial Sequence
  Description of Artificial Sequence: Synthetic peptide
  MOD_RES (1)..(1): 6-aminohexanoic acid
  MOD_RES (4)..(4): 2S, 4R-4-fluoroproline
  MOD_RES (7)..(7): 2S, 4R-4-fluoroproline
  MOD_RES (10)..(10): 2S, 4R-4-fluoroproline
  MOD_RES (13)..(13): 2S, 4R-4-fluoroproline
  MOD_RES (16)..(16): 2S, 4R-4-fluoroproline
  MOD_RES (19)..(19): 2S, 4R-4-fluoroproline
  MOD_RES (22)..(22): 2S, 4R-4-fluoroproline
  MOD_RES (25)..(25): 2S, 4R-4-fluoroproline
  MOD_RES (28)..(28): 2S, 4R-4-fluoroproline
XGPPGPPGPPGPPGPPGPPGPPGPPGPP

SEQ ID NO: 315 - protein, 28 aa, Artificial Sequence
  Description of Artificial Sequence: Synthetic peptide
  MOD_RES (1)..(1): 6-aminohexanoic acid
  MOD_RES (4)..(4): 2S, 4R-4-fluoroproline
  MOD_RES (7)..(7): 2S, 4R-4-fluoroproline
  MOD_RES (10)..(10): 2S, 4R-4-fluoroproline
  MOD_RES (13)..(13): 2S, 4R-4-fluoroproline
  MOD_RES (16)..(16): 2S, 4R-4-fluoroproline
  MOD_RES (19)..(19): 2S, 4R-4-fluoroproline
  MOD_RES (22)..(22): 2S, 4R-4-fluoroproline
  MOD_RES (25)..(25): 2S, 4R-4-fluoroproline
  MOD_RES (28)..(28): 2S, 4R-4-fluoroproline
XGPPGPPGPPGPPGPPGPPGPPGPPGPP

SEQ ID NO: 316 - protein, 28 aa, Artificial Sequence
  Description of Artificial Sequence: Synthetic peptide
  MOD_RES (1)..(1): 6-aminohexanoic acid
  MOD_RES (4)..(4): 2S, 4R-4-fluoroproline
  MOD_RES (7)..(7): 2S, 4R-4-fluoroproline
  MOD_RES (10)..(10): 2S, 4R-4-fluoroproline
  MOD_RES (13)..(13): 2S, 4R-4-fluoroproline
  MOD_RES (16)..(16): 2S, 4R-4-fluoroproline
  MOD_RES (19)..(19): 2S, 4R-4-fluoroproline
  MOD_RES (22)..(22): 2S, 4R-4-fluoroproline
  MOD_RES (25)..(25): 2S, 4R-4-fluoroproline
  MOD_RES (28)..(28): 2S, 4R-4-fluoroproline
XGPPGPPGPPGPPGPPGPPGPPGPPGPP

SEQ ID NO: 317 - protein, 28 aa, Artificial Sequence
  Description of Artificial Sequence: Synthetic peptide
  MOD_RES (1)..(1): 6-aminohexanoic acid
  MOD_RES (4)..(4): 2S, 4R-4-fluoroproline
  MOD_RES (7)..(7): 2S, 4R-4-fluoroproline
  MOD_RES (10)..(10): 2S, 4R-4-fluoroproline
  MOD_RES (13)..(13): 2S, 4R-4-fluoroproline
  MOD_RES (16)..(16): 2S, 4R-4-fluoroproline
  MOD_RES (19)..(19): 2S, 4R-4-fluoroproline
  MOD_RES (22)..(22): 2S, 4R-4-fluoroproline
  MOD_RES (25)..(25): 2S, 4R-4-fluoroproline
  MOD_RES (28)..(28): 2S, 4R-4-fluoroproline
XGPPGPPGPPGPPGPPGPPGPPGPPGPP

SEQ ID NO: 318 - protein, 28 aa, Artificial Sequence
  Description of Artificial Sequence: Synthetic peptide
  MOD_RES (1)..(1): 6-aminohexanoic acid
  MOD_RES (4)..(4): 2S, 4R-4-fluoroproline
  MOD_RES (7)..(7): 2S, 4R-4-fluoroproline
  MOD_RES (10)..(10): 2S, 4R-4-fluoroproline
  MOD_RES (13)..(13): 2S, 4R-4-fluoroproline
  MOD_RES (16)..(16): 2S, 4R-4-fluoroproline
  MOD_RES (19)..(19): 2S, 4R-4-fluoroproline
  MOD_RES (22)..(22): 2S, 4R-4-fluoroproline
  MOD_RES (25)..(25): 2S, 4R-4-fluoroproline
  MOD_RES (28)..(28): 2S, 4R-4-fluoroproline
XGPPGPPGPPGPPGPPGPPGPPGPPGPP

SEQ ID NO: 319 - protein, 28 aa, Artificial Sequence
  Description of Artificial Sequence: Synthetic peptide
  MOD_RES (1)..(1): 6-aminohexanoic acid
  MOD_RES (4)..(4): 2S, 4R-4-fluoroproline
  MOD_RES (7)..(7): 2S, 4R-4-fluoroproline
  MOD_RES (10)..(10): 2S, 4R-4-fluoroproline
  MOD_RES (13)..(13): 2S, 4R-4-fluoroproline
  MOD_RES (16)..(16): 2S, 4R-4-fluoroproline
  MOD_RES (19)..(19): 2S, 4R-4-fluoroproline
  MOD_RES (22)..(22): 2S, 4R-4-fluoroproline
  MOD_RES (25)..(25): 2S, 4R-4-fluoroproline
  MOD_RES (28)..(28): 2S, 4R-4-fluoroproline
XGPPGPPGPPGPPGPPGPPGPPGPPGPP

SEQ ID NO: 320 - protein, 28 aa, Artificial Sequence
  Description of Artificial Sequence: Synthetic peptide
  MOD_RES (1)..(1): 6-aminohexanoic acid
  MOD_RES (4)..(4): 2S, 4R-4-fluoroproline
  MOD_RES (7)..(7): 2S, 4R-4-fluoroproline
  MOD_RES (10)..(10): 2S, 4R-4-fluoroproline
  MOD_RES (13)..(13): 2S, 4R-4-fluoroproline
  MOD_RES (16)..(16): 2S, 4R-4-fluoroproline
  MOD_RES (19)..(19): 2S, 4R-4-fluoroproline
  MOD_RES (22)..(22): 2S, 4R-4-fluoroproline
  MOD_RES (25)..(25): 2S, 4R-4-fluoroproline
  MOD_RES (28)..(28): 2S, 4R-4-fluoroproline
XGPPGPPGPPGPPGPPGPPGPPGPPGPP

SEQ ID NO: 321 - protein, 28 aa, Artificial Sequence
  Description of Artificial Sequence: Synthetic peptide
  MOD_RES (1)..(1): 6-aminohexanoic acid
  MOD_RES (4)..(4): 2S, 4R-4-fluoroproline
  MOD_RES (7)..(7): 2S, 4R-4-fluoroproline
  MOD_RES (10)..(10): 2S, 4R-4-fluoroproline
  MOD_RES (13)..(13): 2S, 4R-4-fluoroproline
  MOD_RES (16)..(16): 2S, 4R-4-fluoroproline
  MOD_RES (19)..(19): 2S, 4R-4-fluoroproline
  MOD_RES (22)..(22): 2S, 4R-4-fluoroproline
  MOD_RES (25)..(25): 2S, 4R-4-fluoroproline
  MOD_RES (28)..(28): 2S, 4R-4-fluoroproline
XGPPGPPGPPGPPGPPGPPGPPGPPGPP

SEQ ID NO: 322 - protein, 28 aa, Artificial Sequence
  Description of Artificial Sequence: Synthetic peptide
  MOD_RES (1)..(1): 6-aminohexanoic acid
  MOD_RES (4)..(4): 2S, 4R-4-fluoroproline
  MOD_RES (7)..(7): 2S, 4R-4-fluoroproline
  MOD_RES (10)..(10): 2S, 4R-4-fluoroproline
  MOD_RES (13)..(13): 2S, 4R-4-fluoroproline
  MOD_RES (16)..(16): 2S, 4R-4-fluoroproline
  MOD_RES (19)..(19): 2S, 4R-4-fluoroproline
  MOD_RES (22)..(22): 2S, 4R-4-fluoroproline
  MOD_RES (25)..(25): 2S, 4R-4-fluoroproline
  MOD_RES (28)..(28): 2S, 4R-4-fluoroproline
XGPPGPPGPPGPPGPPGPPGPPGPPGPP

SEQ ID NO: 323 - protein, 28 aa, Artificial Sequence
  Description of Artificial Sequence: Synthetic peptide
  MOD_RES (1)..(1): 6-aminohexanoic acid
  MOD_RES (4)..(4): 2S, 4R-4-fluoroproline
  MOD_RES (7)..(7): 2S, 4R-4-fluoroproline
  MOD_RES (10)..(10): 2S, 4R-4-fluoroproline
  MOD_RES (13)..(13): 2S, 4R-4-fluoroproline
  MOD_RES (16)..(16): 2S, 4R-4-fluoroproline
  MOD_RES (19)..(19): 2S, 4R-4-fluoroproline
  MOD_RES (22)..(22): 2S, 4R-4-fluoroproline
  MOD_RES (25)..(25): 2S, 4R-4-fluoroproline
  MOD_RES (28)..(28): 2S, 4R-4-fluoroproline
XGPPGPPGPPGPPGPPGPPGPPGPPGPP

SEQ ID NO: 324 - protein, 28 aa, Artificial Sequence
  Description of Artificial Sequence: Synthetic peptide
  MOD_RES (1)..(1): 6-aminohexanoic acid
  MOD_RES (4)..(4): 2S, 4R-4-fluoroproline
  MOD_RES (7)..(7): 2S, 4R-4-fluoroproline
  MOD_RES (10)..(10): 2S, 4R-4-fluoroproline
  MOD_RES (13)..(13): 2S, 4R-4-fluoroproline
  MOD_RES (16)..(16): 2S, 4R-4-fluoroproline
  MOD_RES (19)..(19): 2S, 4R-4-fluoroproline
  MOD_RES (22)..(22): 2S, 4R-4-fluoroproline
  MOD_RES (25)..(25): 2S, 4R-4-fluoroproline
  MOD_RES (28)..(28): 2S, 4R-4-fluoroproline
XGPPGPPGPPGPPGPPGPPGPPGPPGPP

SEQ ID NO: 325 - protein, 28 aa, Artificial Sequence
  Description of Artificial Sequence: Synthetic peptide
  MOD_RES (1)..(1): 6-aminohexanoic acid
  MOD_RES (4)..(4): 2S, 4R-4-fluoroproline
  MOD_RES (7)..(7): 2S, 4R-4-fluoroproline
  MOD_RES (10)..(10): 2S, 4R-4-fluoroproline
  MOD_RES (13)..(13): 2S, 4R-4-fluoroproline
  MOD_RES (16)..(16): 2S, 4R-4-fluoroproline
  MOD_RES (19)..(19): 2S, 4R-4-fluoroproline
  MOD_RES (22)..(22): 2S, 4R-4-fluoroproline
  MOD_RES (25)..(25): 2S, 4R-4-fluoroproline
  MOD_RES (28)..(28): 2S, 4R-4-fluoroproline
XGPPGPPGPPGPPGPPGPPGPPGPPGPP

SEQ ID NO: 326 - protein, 28 aa, Artificial Sequence
  Description of Artificial Sequence: Synthetic peptide
  MOD_RES (1)..(1): 6-aminohexanoic acid
  MOD_RES (4)..(4): 2S, 4R-4-fluoroproline
  MOD_RES (7)..(7): 2S, 4R-4-fluoroproline
  MOD_RES (10)..(10): 2S, 4R-4-fluoroproline
  MOD_RES (13)..(13): 2S, 4R-4-fluoroproline
  MOD_RES (16)..(16): 2S, 4R-4-fluoroproline
  MOD_RES (19)..(19): 2S, 4R-4-fluoroproline
  MOD_RES (22)..(22): 2S, 4R-4-fluoroproline
  MOD_RES (25)..(25): 2S, 4R-4-fluoroproline
  MOD_RES (28)..(28): 2S, 4R-4-fluoroproline
XGPPGPPGPPGPPGPPGPPGPPGPPGPP

SEQ ID NO: 327 - protein, 28 aa, Artificial Sequence
  Description of Artificial Sequence: Synthetic peptide
  MOD_RES (1)..(1): 6-aminohexanoic acid
  MOD_RES (4)..(4): 2S, 4R-4-fluoroproline
  MOD_RES (7)..(7): 2S, 4R-4-fluoroproline
  MOD_RES (10)..(10): 2S, 4R-4-fluoroproline
  MOD_RES (13)..(13): 2S, 4R-4-fluoroproline
  MOD_RES (16)..(16): 2S, 4R-4-fluoroproline
  MOD_RES (19)..(19): 2S, 4R-4-fluoroproline
  MOD_RES (22)..(22): 2S, 4R-4-fluoroproline
  MOD_RES (25)..(25): 2S, 4R-4-fluoroproline
  MOD_RES (28)..(28): 2S, 4R-4-fluoroproline
XGPPGPPGPPGPPGPPGPPGPPGPPGPP

SEQ ID NO: 328 - protein, 28 aa, Artificial Sequence
  Description of Artificial Sequence: Synthetic peptide
  MOD_RES (1)..(1): 6-aminohexanoic acid
  MOD_RES (4)..(4): 2S, 4R-4-fluoroproline
  MOD_RES (7)..(7): 2S, 4R-4-fluoroproline
  MOD_RES (10)..(10): 2S, 4R-4-fluoroproline
  MOD_RES (13)..(13): 2S, 4R-4-fluoroproline
  MOD_RES (16)..(16): 2S, 4R-4-fluoroproline
  MOD_RES (19)..(19): 2S, 4R-4-fluoroproline
  MOD_RES (22)..(22): 2S, 4R-4-fluoroproline
  MOD_RES (25)..(25): 2S, 4R-4-fluoroproline
  MOD_RES (28)..(28): 2S, 4R-4-fluoroproline
XGPPGPPGPPGPPGPPGPPGPPGPPGPP

SEQ ID NO: 329 - protein, 28 aa, Artificial Sequence
  Description of Artificial Sequence: Synthetic peptide
  MOD_RES (1)..(1): 6-aminohexanoic acid
  MOD_RES (4)..(4): 2S, 4R-4-fluoroproline
  MOD_RES (7)..(7): 2S, 4R-4-fluoroproline
  MOD_RES (10)..(10): 2S, 4R-4-fluoroproline
  MOD_RES (13)..(13): 2S, 4R-4-fluoroproline
  MOD_RES (16)..(16): 2S, 4R-4-fluoroproline
  MOD_RES (19)..(19): 2S, 4R-4-fluoroproline
  MOD_RES (22)..(22): 2S, 4R-4-fluoroproline
  MOD_RES (25)..(25): 2S, 4R-4-fluoroproline
  MOD_RES (28)..(28): 2S, 4R-4-fluoroproline
XGPPGPPGPPGPPGPPGPPGPPGPPGPP

SEQ ID NO: 330 - protein, 28 aa, Artificial Sequence
  Description of Artificial Sequence: Synthetic peptide
  MOD_RES (1)..(1): 6-aminohexanoic acid
  MOD_RES (4)..(4): 2S, 4R-4-fluoroproline
  MOD_RES (7)..(7): 2S, 4R-4-fluoroproline
  MOD_RES (10)..(10): 2S, 4R-4-fluoroproline
  MOD_RES (13)..(13): 2S, 4R-4-fluoroproline
  MOD_RES (16)..(16): 2S, 4R-4-fluoroproline
  MOD_RES (19)..(19): 2S, 4R-4-fluoroproline
  MOD_RES (22)..(22): 2S, 4R-4-fluoroproline
  MOD_RES (25)..(25): 2S, 4R-4-fluoroproline
  MOD_RES (28)..(28): 2S, 4R-4-fluoroproline
XGPPGPPGPPGPPGPPGPPGPPGPPGPP

SEQ ID NO: 331 - protein, 28 aa, Artificial Sequence
  Description of Artificial Sequence: Synthetic peptide
  MOD_RES (1)..(1): 6-aminohexanoic acid
  MOD_RES (4)..(4): 2S, 4R-4-fluoroproline
  MOD_RES (7)..(7): 2S, 4R-4-fluoroproline
  MOD_RES (10)..(10): 2S, 4R-4-fluoroproline
  MOD_RES (13)..(13): 2S, 4R-4-fluoroproline
  MOD_RES (16)..(16): 2S, 4R-4-fluoroproline
  MOD_RES (19)..(19): 2S, 4R-4-fluoroproline
  MOD_RES (22)..(22): 2S, 4R-4-fluoroproline
  MOD_RES (25)..(25): 2S, 4R-4-fluoroproline
  MOD_RES (28)..(28): 2S, 4R-4-fluoroproline
XGPPGPPGPPGPPGPPGPPGPPGPPGPP

SEQ ID NO: 332 - protein, 28 aa, Artificial Sequence
  Description of Artificial Sequence: Synthetic peptide
  MOD_RES (1)..(1): 6-aminohexanoic acid
  MOD_RES (4)..(4): 2S, 4R-4-fluoroproline
  MOD_RES (7)..(7): 2S, 4R-4-fluoroproline
  MOD_RES (10)..(10): 2S, 4R-4-fluoroproline
  MOD_RES (13)..(13): 2S, 4R-4-fluoroproline
  MOD_RES (16)..(16): 2S, 4R-4-fluoroproline
  MOD_RES (19)..(19): 2S, 4R-4-fluoroproline
  MOD_RES (22)..(22): 2S, 4R-4-fluoroproline
  MOD_RES (25)..(25): 2S, 4R-4-fluoroproline
  MOD_RES (28)..(28): 2S, 4R-4-fluoroproline
XGPPGPPGPPGPPGPPGPPGPPGPPGPP

SEQ ID NO: 333 - protein, 28 aa, Artificial Sequence
  Description of Artificial Sequence: Synthetic peptide
  MOD_RES (1)..(1): 6-aminohexanoic acid
  MOD_RES (4)..(4): 2S, 4R-4-fluoroproline
  MOD_RES (7)..(7): 2S, 4R-4-fluoroproline
  MOD_RES (10)..(10): 2S, 4R-4-fluoroproline
  MOD_RES (13)..(13): 2S, 4R-4-fluoroproline
  MOD_RES (16)..(16): 2S, 4R-4-fluoroproline
  MOD_RES (19)..(19): 2S, 4R-4-fluoroproline
  MOD_RES (22)..(22): 2S, 4R-4-fluoroproline
  MOD_RES (25)..(25): 2S, 4R-4-fluoroproline
  MOD_RES (28)..(28): 2S, 4R-4-fluoroproline
XGPPGPPGPPGPPGPPGPPGPPGPPGPP

SEQ ID NO: 334 - protein, 28 aa, Artificial Sequence
  Description of Artificial Sequence: Synthetic peptide
  MOD_RES (1)..(1): 6-aminohexanoic acid
  MOD_RES (4)..(4): 2S, 4R-4-fluoroproline
  MOD_RES (7)..(7): 2S, 4R-4-fluoroproline
  MOD_RES (10)..(10): 2S, 4R-4-fluoroproline
  MOD_RES (13)..(13): 2S, 4R-4-fluoroproline
  MOD_RES (16)..(16): 2S, 4R-4-fluoroproline
  MOD_RES (19)..(19): 2S, 4R-4-fluoroproline
  MOD_RES (22)..(22): 2S, 4R-4-fluoroproline
  MOD_RES (25)..(25): 2S, 4R-4-fluoroproline
  MOD_RES (28)..(28): 2S, 4R-4-fluoroproline
XGPPGPPGPPGPPGPPGPPGPPGPPGPP

SEQ ID NO: 335 - protein, 28 aa, Artificial Sequence
  Description of Artificial Sequence: Synthetic peptide
  MOD_RES (1)..(1): 6-aminohexanoic acid
  MOD_RES (4)..(4): 2S, 4R-4-fluoroproline
  MOD_RES (7)..(7): 2S, 4R-4-fluoroproline
  MOD_RES (10)..(10): 2S, 4R-4-fluoroproline
  MOD_RES (13)..(13): 2S, 4R-4-fluoroproline
  MOD_RES (16)..(16): 2S, 4R-4-fluoroproline
  MOD_RES (19)..(19): 2S, 4R-4-fluoroproline
  MOD_RES (22)..(22): 2S, 4R-4-fluoroproline
  MOD_RES (25)..(25): 2S, 4R-4-fluoroproline
  MOD_RES (28)..(28): 2S, 4R-4-fluoroproline
XGPPGPPGPPGPPGPPGPPGPPGPPGPP

SEQ ID NO: 336 - protein, 28 aa, Artificial Sequence
  Description of Artificial Sequence: Synthetic peptide
  MOD_RES (1)..(1): 6-aminohexanoic acid
  MOD_RES (4)..(4): 2S, 4R-4-fluoroproline
  MOD_RES (7)..(7): 2S, 4R-4-fluoroproline
  MOD_RES (10)..(10): 2S, 4R-4-fluoroproline
  MOD_RES (13)..(13): 2S, 4R-4-fluoroproline
  MOD_RES (16)..(16): 2S, 4R-4-fluoroproline
  MOD_RES (19)..(19): 2S, 4R-4-fluoroproline
  MOD_RES (22)..(22): 2S, 4R-4-fluoroproline
  MOD_RES (25)..(25): 2S, 4R-4-fluoroproline
  MOD_RES (28)..(28): 2S, 4R-4-fluoroproline
XGPPGPPGPPGPPGPPGPPGPPGPPGPP

SEQ ID NO: 337 - protein, 28 aa, Artificial Sequence
  Description of Artificial Sequence: Synthetic peptide
  MOD_RES (1)..(1): 6-aminohexanoic acid
  MOD_RES (4)..(4): 2S, 4R-4-fluoroproline
  MOD_RES (7)..(7): 2S, 4R-4-fluoroproline
  MOD_RES (10)..(10): 2S, 4R-4-fluoroproline
  MOD_RES (13)..(13): 2S, 4R-4-fluoroproline
  MOD_RES (16)..(16): 2S, 4R-4-fluoroproline
  MOD_RES (19)..(19): 2S, 4R-4-fluoroproline
  MOD_RES (22)..(22): 2S, 4R-4-fluoroproline
  MOD_RES (25)..(25): 2S, 4R-4-fluoroproline
  MOD_RES (28)..(28): 2S, 4R-4-fluoroproline
XGPPGPPGPPGPPGPPGPPGPPGPPGPP

SEQ ID NO: 338 - protein, 60 aa, Artificial Sequence
  Description of Artificial Sequence: Synthetic polypeptide
  MOD_RES (3)..(3): Hydroxyproline
  MOD_RES (6)..(6): Hydroxyproline
  MOD_RES (9)..(9): Hydroxyproline
  MOD_RES (12)..(12): Hydroxyproline
  MOD_RES (15)..(15): Hydroxyproline
  MOD_RES (18)..(18): Hydroxyproline
  MOD_RES (21)..(21): Hydroxyproline
  MOD_RES (24)..(24): Hydroxyproline
  MOD_RES (27)..(27): Hydroxyproline
  MOD_RES (30)..(30): Hydroxyproline
  MOD_RES (33)..(33): Hydroxyproline
  MOD_RES (36)..(36): Hydroxyproline
  MOD_RES (39)..(39): Hydroxyproline
  MOD_RES (42)..(42): Hydroxyproline
  MOD_RES (45)..(45): Hydroxyproline
  MOD_RES (48)..(48): Hydroxyproline
  MOD_RES (51)..(51): Hydroxyproline
  MOD_RES (54)..(54): Hydroxyproline
  MOD_RES (57)..(57): Hydroxyproline
  MOD_RES (60)..(60): Hydroxyproline
  SITE (1)..(60): This sequence may encompass 3-20 "Gly-Pro-O" repeating units, wherein O is hydroxyproline
GPPGPPGPPGPPGPPGPPGPPGPPGPPGPPGPPGPPGPPGPPGPPGPPGPPGPPGPPGPP

SEQ ID NO: 339 - protein, 60 aa, Artificial Sequence; identical to SEQ ID NO: 338
  Description of Artificial Sequence: Synthetic polypeptide
  MOD_RES (2)..(2): 2S, 4S-4-fluoroproline
  MOD_RES (3)..(3): Hydroxyproline
  MOD_RES (5)..(5): 2S, 4S-4-fluoroproline
  MOD_RES (6)..(6): Hydroxyproline
  MOD_RES (8)..(8): 2S, 4S-4-fluoroproline
  MOD_RES (9)..(9): Hydroxyproline
  MOD_RES (11)..(11): 2S, 4S-4-fluoroproline
  MOD_RES (12)..(12): Hydroxyproline
  MOD_RES (14)..(14): 2S, 4S-4-fluoroproline
  MOD_RES (15)..(15): Hydroxyproline
  MOD_RES (17)..(17): 2S, 4S-4-fluoroproline
  MOD_RES (18)..(18): Hydroxyproline
  MOD_RES (20)..(20): 2S, 4S-4-fluoroproline
  MOD_RES (21)..(21): Hydroxyproline
  MOD_RES (23)..(23): 2S, 4S-4-fluoroproline
  MOD_RES (24)..(24): Hydroxyproline
  MOD_RES (26)..(26): 2S, 4S-4-fluoroproline
  MOD_RES (27)..(27): Hydroxyproline
  MOD_RES (29)..(29): 2S, 4S-4-fluoroproline
  MOD_RES (30)..(30): Hydroxyproline
  MOD_RES (32)..(32): 2S, 4S-4-fluoroproline
  MOD_RES (33)..(33): Hydroxyproline
  MOD_RES (35)..(35): 2S, 4S-4-fluoroproline
  MOD_RES (36)..(36): Hydroxyproline
  MOD_RES (38)..(38): 2S, 4S-4-fluoroproline
  MOD_RES (39)..(39): Hydroxyproline
  MOD_RES (41)..(41): 2S, 4S-4-fluoroproline
  MOD_RES (42)..(42): Hydroxyproline
  MOD_RES (44)..(44): 2S, 4S-4-fluoroproline
  MOD_RES (45)..(45): Hydroxyproline
  MOD_RES (47)..(47): 2S, 4S-4-fluoroproline
  MOD_RES (48)..(48): Hydroxyproline
  MOD_RES (50)..(50): 2S, 4S-4-fluoroproline
  MOD_RES (51)..(51): Hydroxyproline
  MOD_RES (53)..(53): 2S, 4S-4-fluoroproline
  MOD_RES (54)..(54): Hydroxyproline
  MOD_RES (56)..(56): 2S, 4S-4-fluoroproline
  MOD_RES (57)..(57): Hydroxyproline
  MOD_RES (59)..(59): 2S, 4S-4-fluoroproline
  MOD_RES (60)..(60): Hydroxyproline
  SITE (1)..(60): This sequence may encompass 3-20 "Gly-f-O" repeating units, wherein f if 2S,4S-4-fluoroproline and O is hydroxyproline

SEQ ID NO: 340 - protein, 60 aa, Artificial Sequence; identical to SEQ ID NO: 338
  Description of Artificial Sequence: Synthetic polypeptide
  MOD_RES (2)..(2): Hydroxyproline
  MOD_RES (5)..(5): Hydroxyproline
  MOD_RES (8)..(8): Hydroxyproline
  MOD_RES (11)..(11): Hydroxyproline
  MOD_RES (14)..(14): Hydroxyproline
  MOD_RES (17)..(17): Hydroxyproline
  MOD_RES (20)..(20): Hydroxyproline
  MOD_RES (23)..(23): Hydroxyproline
  MOD_RES (26)..(26): Hydroxyproline
  MOD_RES (29)..(29): Hydroxyproline
  MOD_RES (32)..(32): Hydroxyproline
  MOD_RES (35)..(35): Hydroxyproline
  MOD_RES (38)..(38): Hydroxyproline
  MOD_RES (41)..(41): Hydroxyproline
  MOD_RES (44)..(44): Hydroxyproline
  MOD_RES (47)..(47): Hydroxyproline
  MOD_RES (50)..(50): Hydroxyproline
  MOD_RES (53)..(53): Hydroxyproline
  MOD_RES (56)..(56): Hydroxyproline
  MOD_RES (59)..(59): Hydroxyproline
  SITE (1)..(60): This sequence may encompass 3-20 "Gly-O-Pro" repeating units, wherein O is hydroxyproline

SEQ ID NO: 341 - protein, 60 aa, Artificial Sequence; identical to SEQ ID NO: 338
  Description of Artificial Sequence: Synthetic polypeptide
  MOD_RES (1)..(1): aza-Glycine
  MOD_RES (3)..(3): Hydroxyproline
  MOD_RES (4)..(4): aza-Glycine
  MOD_RES (6)..(6): Hydroxyproline
  MOD_RES (7)..(7): aza-Glycine
  MOD_RES (9)..(9): Hydroxyproline
  MOD_RES (10)..(10): aza-Glycine
  MOD_RES (12)..(12): Hydroxyproline
  MOD_RES (13)..(13): aza-Glycine
  MOD_RES (15)..(15): Hydroxyproline
  MOD_RES (16)..(16): aza-Glycine
  MOD_RES (18)..(18): Hydroxyproline
  MOD_RES (19)..(19): aza-Glycine
  MOD_RES (21)..(21): Hydroxyproline
  MOD_RES (22)..(22): aza-Glycine
  MOD_RES (24)..(24): Hydroxyproline
  MOD_RES (25)..(25): aza-Glycine
  MOD_RES (27)..(27): Hydroxyproline
  MOD_RES (28)..(28): aza-Glycine
  MOD_RES (30)..(30): Hydroxyproline
  MOD_RES (31)..(31): aza-Glycine
  MOD_RES (33)..(33): Hydroxyproline
  MOD_RES (34)..(34): aza-Glycine
  MOD_RES (36)..(36): Hydroxyproline
  MOD_RES (37)..(37): aza-Glycine
  MOD_RES (39)..(39): Hydroxyproline
  MOD_RES (40)..(40): aza-Glycine
  MOD_RES (42)..(42): Hydroxyproline
  MOD_RES (43)..(43): aza-Glycine
  MOD_RES (45)..(45): Hydroxyproline
  MOD_RES (46)..(46): aza-Glycine
  MOD_RES (48)..(48): Hydroxyproline
  MOD_RES (49)..(49): aza-Glycine
  MOD_RES (51)..(51): Hydroxyproline
  MOD_RES (52)..(52): aza-Glycine
  MOD_RES (54)..(54): Hydroxyproline
  MOD_RES (55)..(55): aza-Glycine
  MOD_RES (57)..(57): Hydroxyproline
  MOD_RES (58)..(58): aza-Glycine
  MOD_RES (60)..(60): Hydroxyproline
  SITE (1)..(60): This sequence may encompass 3-20 "azG-Pro-O" repeating units, wherein azG is aza-glycine and O is hydroxyproline

SEQ ID NO: 342 - protein, 60 aa, Artificial Sequence; identical to SEQ ID NO: 338
  Description of Artificial Sequence: Synthetic polypeptide
  MOD_RES (1)..(1): aza-Glycine
  MOD_RES (2)..(2): 2S, 4S-4-fluoroproline
  MOD_RES (3)..(3): Hydroxyproline
  MOD_RES (4)..(4): aza-Glycine
  MOD_RES (5)..(5): 2S, 4S-4-fluoroproline
  MOD_RES (6)..(6): Hydroxyproline
  MOD_RES (7)..(7): aza-Glycine
  MOD_RES (8)..(8): 2S, 4S-4-fluoroproline
  MOD_RES (9)..(9): Hydroxyproline
  MOD_RES (10)..(10): aza-Glycine
  MOD_RES (11)..(11): 2S, 4S-4-fluoroproline
  MOD_RES (12)..(12): Hydroxyproline
  MOD_RES (13)..(13): aza-Glycine
  MOD_RES (14)..(14): 2S, 4S-4-fluoroproline
  MOD_RES (15)..(15): Hydroxyproline
  MOD_RES (16)..(16): aza-Glycine
  MOD_RES (17)..(17): 2S, 4S-4-fluoroproline
  MOD_RES (18)..(18): Hydroxyproline
  MOD_RES (19)..(19): aza-Glycine
  MOD_RES (20)..(20): 2S, 4S-4-fluoroproline
  MOD_RES (21)..(21): Hydroxyproline
  MOD_RES (22)..(22): aza-Glycine
  MOD_RES (23)..(23): 2S, 4S-4-fluoroproline
  MOD_RES (24)..(24): Hydroxyproline
  MOD_RES (25)..(25): aza-Glycine
  MOD_RES (26)..(26): 2S, 4S-4-fluoroproline
  MOD_RES (27)..(27): Hydroxyproline
  MOD_RES (28)..(28): aza-Glycine
  MOD_RES (29)..(29): 2S, 4S-4-fluoroproline
  MOD_RES (30)..(30): Hydroxyproline
  MOD_RES (31)..(31): aza-Glycine
  MOD_RES (32)..(32): 2S, 4S-4-fluoroproline
  MOD_RES (33)..(33): Hydroxyproline
  MOD_RES (34)..(34): aza-Glycine
  MOD_RES (35)..(35): 2S, 4S-4-fluoroproline
  MOD_RES (36)..(36): Hydroxyproline
  MOD_RES (37)..(37): aza-Glycine
  MOD_RES (38)..(38): 2S, 4S-4-fluoroproline
  MOD_RES (39)..(39): Hydroxyproline
  MOD_RES (40)..(40): aza-Glycine
  MOD_RES (41)..(41): 2S, 4S-4-fluoroproline
  MOD_RES (42)..(42): Hydroxyproline
  MOD_RES (43)..(43): aza-Glycine
  MOD_RES (44)..(44): 2S, 4S-4-fluoroproline
  MOD_RES (45)..(45): Hydroxyproline
  MOD_RES (46)..(46): aza-Glycine
  MOD_RES (47)..(47): 2S, 4S-4-fluoroproline
  MOD_RES (48)..(48): Hydroxyproline
  MOD_RES (49)..(49): aza-Glycine
  MOD_RES (50)..(50): 2S, 4S-4-fluoroproline
  MOD_RES (51)..(51): Hydroxyproline
  MOD_RES (52)..(52): aza-Glycine
  MOD_RES (53)..(53): 2S, 4S-4-fluoroproline
  MOD_RES (54)..(54): Hydroxyproline
  MOD_RES (55)..(55): aza-Glycine
  MOD_RES (56)..(56): 2S, 4S-4-fluoroproline
  MOD_RES (57)..(57): Hydroxyproline
  MOD_RES (58)..(58): aza-Glycine
  MOD_RES (59)..(59): 2S, 4S-4-fluoroproline
  MOD_RES (60)..(60): Hydroxyproline
  SITE (1)..(60): This sequence may encompass 3-20 "azG-f-O" repeating units, wherein azG is aza-glycine, f is 2S, 4S-4-fluoroproline and O is hydroxyproline

SEQ ID NO: 343 - protein, 60 aa, Artificial Sequence; identical to SEQ ID NO: 338
  Description of Artificial Sequence: Synthetic polypeptide
  MOD_RES (3)..(3): 2S, 4R-4-fluoroproline
  MOD_RES (6)..(6): 2S, 4R-4-fluoroproline
  MOD_RES (9)..(9): 2S, 4R-4-fluoroproline
  MOD_RES (12)..(12): 2S, 4R-4-fluoroproline
  MOD_RES (15)..(15): 2S, 4R-4-fluoroproline
  MOD_RES (18)..(18): 2S, 4R-4-fluoroproline
  MOD_RES (21)..(21): 2S, 4R-4-fluoroproline
  MOD_RES (24)..(24): 2S, 4R-4-fluoroproline
  MOD_RES (27)..(27): 2S, 4R-4-fluoroproline
  MOD_RES (30)..(30): 2S, 4R-4-fluoroproline
  MOD_RES (33)..(33): 2S, 4R-4-fluoroproline
  MOD_RES (36)..(36): 2S, 4R-4-fluoroproline
  MOD_RES (39)..(39): 2S, 4R-4-fluoroproline
  MOD_RES (42)..(42): 2S, 4R-4-fluoroproline
  MOD_RES (45)..(45): 2S, 4R-4-fluoroproline
  MOD_RES (48)..(48): 2S, 4R-4-fluoroproline
  MOD_RES (51)..(51): 2S, 4R-4-fluoroproline
  MOD_RES (54)..(54): 2S, 4R-4-fluoroproline
  MOD_RES (57)..(57): 2S, 4R-4-fluoroproline
  MOD_RES (60)..(60): 2S, 4R-4-fluoroproline
  SITE (1)..(60): This sequence may encompass 3-20 "Gly-Pro-F" repeating units, wherein F is 2S, 4R-4-fluoroproline

SEQ ID NO: 344 - protein, 60 aa, Artificial Sequence; identical to SEQ ID NO: 338
  Description of Artificial Sequence: Synthetic polypeptide

SEQ ID NO: 345 - protein, 60 aa, Artificial Sequence; identical to SEQ ID NO: 338
  Description of Artificial Sequence: Synthetic polypeptide
  MOD_RES (1)..(1): aza-Glycine
  MOD_RES (4)..(4): aza-Glycine
  MOD_RES (7)..(7): aza-Glycine
  MOD_RES (10)..(10): aza-Glycine
  MOD_RES (13)..(13): aza-Glycine
  MOD_RES (16)..(16): aza-Glycine
  MOD_RES (19)..(19): aza-Glycine
  MOD_RES (22)..(22): aza-Glycine
  MOD_RES (25)..(25): aza-Glycine
  MOD_RES (28)..(28): aza-Glycine
  MOD_RES (31)..(31): aza-Glycine
  MOD_RES (34)..(34): aza-Glycine
  MOD_RES (37)..(37): aza-Glycine
  MOD_RES (40)..(40): aza-Glycine
  MOD_RES (43)..(43): aza-Glycine
  MOD_RES (46)..(46): aza-Glycine
  MOD_RES (49)..(49): aza-Glycine
  MOD_RES (52)..(52): aza-Glycine
  MOD_RES (55)..(55): aza-Glycine
  MOD_RES (58)..(58): aza-Glycine
  SITE (1)..(60): This sequence may encompass 3-20 "azG-Pro-Pro" repeating units, wherein azG is aza-glycine

SEQ ID NO: 346 - protein, 60 aa, Artificial Sequence; identical to SEQ ID NO: 338
  Description of Artificial Sequence: Synthetic polypeptide
  MOD_RES (1)..(1): aza-Glycine
  MOD_RES (2)..(2): 2S, 4S-4-chloroproline
  MOD_RES (3)..(3): 2S, 4R-Hydroxyproline
  MOD_RES (4)..(4): aza-Glycine
  MOD_RES (5)..(5): 2S, 4S-4-chloroproline
  MOD_RES (6)..(6): 2S, 4R-Hydroxyproline
  MOD_RES (7)..(7): aza-Glycine
  MOD_RES (8)..(8): 2S, 4S-4-chloroproline
  MOD_RES (9)..(9): 2S, 4R-Hydroxyproline
  MOD_RES (10)..(10): aza-Glycine
  MOD_RES (11)..(11): 2S, 4S-4-chloroproline
  MOD_RES (12)..(12): 2S, 4R-Hydroxyproline
  MOD_RES (13)..(13): aza-Glycine
  MOD_RES (14)..(14): 2S, 4S-4-chloroproline
  MOD_RES (15)..(15): 2S, 4R-Hydroxyproline
  MOD_RES (16)..(16): aza-Glycine
  MOD_RES (17)..(17): 2S, 4S-4-chloroproline
  MOD_RES (18)..(18): 2S, 4R-Hydroxyproline
  MOD_RES (19)..(19): aza-Glycine
  MOD_RES (20)..(20): 2S, 4S-4-chloroproline
  MOD_RES (21)..(21): 2S, 4R-Hydroxyproline
  MOD_RES (22)..(22): aza-Glycine
  MOD_RES (23)..(23): 2S, 4S-4-chloroproline
  MOD_RES (24)..(24): 2S, 4R-Hydroxyproline
  MOD_RES (25)..(25): aza-Glycine
  MOD_RES (26)..(26): 2S, 4S-4-chloroproline
  MOD_RES (27)..(27): 2S, 4R-Hydroxyproline
  MOD_RES (28)..(28): aza-Glycine
  MOD_RES (29)..(29): 2S, 4S-4-chloroproline
  MOD_RES (30)..(30): 2S, 4R-Hydroxyproline
  MOD_RES (31)..(31): aza-Glycine
  MOD_RES (32)..(32): 2S, 4S-4-chloroproline
  MOD_RES (33)..(33): 2S, 4R-Hydroxyproline
  MOD_RES (34)..(34): aza-Glycine
  MOD_RES (35)..(35): 2S, 4S-4-chloroproline
  MOD_RES (36)..(36): 2S, 4R-Hydroxyproline
  MOD_RES (37)..(37): aza-Glycine
  MOD_RES (38)..(38): 2S, 4S-4-chloroproline
  MOD_RES (39)..(39): 2S, 4R-Hydroxyproline
  MOD_RES (40)..(40): aza-Glycine
  MOD_RES (41)..(41): 2S, 4S-4-chloroproline
  MOD_RES (42)..(42): 2S, 4R-Hydroxyproline
  MOD_RES (43)..(43): aza-Glycine
  MOD_RES (44)..(44): 2S, 4S-4-chloroproline
  MOD_RES (45)..(45): 2S, 4R-Hydroxyproline
  MOD_RES (46)..(46): aza-Glycine
  MOD_RES (47)..(47): 2S, 4S-4-chloroproline
  MOD_RES (48)..(48): 2S, 4R-Hydroxyproline
  MOD_RES (49)..(49): aza-Glycine
  MOD_RES (50)..(50): 2S, 4S-4-chloroproline
  MOD_RES (51)..(51): 2S, 4R-Hydroxyproline
  MOD_RES (52)..(52): aza-Glycine
  MOD_RES (53)..(53): 2S, 4S-4-chloroproline
  MOD_RES (54)..(54): 2S, 4R-Hydroxyproline
  MOD_RES (55)..(55): aza-Glycine
  MOD_RES (56)..(56): 2S, 4S-4-chloroproline
  MOD_RES (57)..(57): 2S, 4R-Hydroxyproline
  MOD_RES (58)..(58): aza-Glycine
  MOD_RES (59)..(59): 2S, 4S-4-chloroproline
  MOD_RES (60)..(60): 2S, 4R-Hydroxyproline
  SITE (1)..(60): This sequence may encompass 3-20 "azG-c-O" repeating units, wherein azG is aza-glycine, c is 2S, 4S-4-chloroproline and O is 2S, 4R-Hydroxyproline

SEQ ID NO: 347 - protein, 60 aa, Artificial Sequence; identical to SEQ ID NO: 338
  Description of Artificial Sequence: Synthetic polypeptide
  MOD_RES (2)..(2): 2S, 4S-4-chloroproline
  MOD_RES (3)..(3): 2S, 4R-Hydroxyproline
  MOD_RES (5)..(5): 2S, 4S-4-chloroproline
  MOD_RES (6)..(6): 2S, 4R-Hydroxyproline
  MOD_RES (8)..(8): 2S, 4S-4-chloroproline
  MOD_RES (9)..(9): 2S, 4R-Hydroxyproline
  MOD_RES (11)..(11): 2S, 4S-4-chloroproline
  MOD_RES (12)..(12): 2S, 4R-Hydroxyproline
  MOD_RES (14)..(14): 2S, 4S-4-chloroproline
  MOD_RES (15)..(15): 2S, 4R-Hydroxyproline
  MOD_RES (17)..(17): 2S, 4S-4-chloroproline
  MOD_RES (18)..(18): 2S, 4R-Hydroxyproline
  MOD_RES (20)..(20): 2S, 4S-4-chloroproline
  MOD_RES (21)..(21): 2S, 4R-Hydroxyproline
  MOD_RES (23)..(23): 2S, 4S-4-chloroproline
  MOD_RES (24)..(24): 2S, 4R-Hydroxyproline
  MOD_RES (26)..(26): 2S, 4S-4-chloroproline
  MOD_RES (27)..(27): 2S, 4R-Hydroxyproline
  MOD_RES (29)..(29): 2S, 4S-4-chloroproline
  MOD_RES (30)..(30): 2S, 4R-Hydroxyproline
  MOD_RES (32)..(32): 2S, 4S-4-chloroproline
  MOD_RES (33)..(33): 2S, 4R-Hydroxyproline
  MOD_RES (35)..(35): 2S, 4S-4-chloroproline
  MOD_RES (36)..(36): 2S, 4R-Hydroxyproline
  MOD_RES (38)..(38): 2S, 4S-4-chloroproline
  MOD_RES (39)..(39): 2S, 4R-Hydroxyproline
  MOD_RES (41)..(41): 2S, 4S-4-chloroproline
  MOD_RES (42)..(42): 2S, 4R-Hydroxyproline
  MOD_RES (44)..(44): 2S, 4S-4-chloroproline
  MOD_RES (45)..(45): 2S, 4R-Hydroxyproline
  MOD_RES (47)..(47): 2S, 4S-4-chloroproline
  MOD_RES (48)..(48): 2S, 4R-Hydroxyproline
  MOD_RES (50)..(50): 2S, 4S-4-chloroproline
  MOD_RES (51)..(51): 2S, 4R-Hydroxyproline
  MOD_RES (53)..(53): 2S, 4S-4-chloroproline
  MOD_RES (54)..(54): 2S, 4R-Hydroxyproline
  MOD_RES (56)..(56): 2S, 4S-4-chloroproline
  MOD_RES (57)..(57): 2S, 4R-Hydroxyproline
  MOD_RES (59)..(59): 2S, 4S-4-chloroproline
  MOD_RES (60)..(60): 2S, 4R-Hydroxyproline
  SITE (1)..(60): This sequence may encompass 3-20 "Gly-c-O" repeating units, wherein c is 2S, 4S-4-chloroproline and O is 2S, 4R-Hydroxyproline

SEQ ID NO: 348 - protein, 60 aa, Artificial Sequence; identical to SEQ ID NO: 338
  Description of Artificial Sequence: Synthetic polypeptide
  MOD_RES (1)..(1): aza-Glycine
  MOD_RES (2)..(2): Hydroxyproline
  MOD_RES (4)..(4): aza-Glycine
  MOD_RES (5)..(5): Hydroxyproline
  MOD_RES (7)..(7): aza-Glycine
  MOD_RES (8)..(8): Hydroxyproline
  MOD_RES (10)..(10): aza-Glycine
  MOD_RES (11)..(11): Hydroxyproline
  MOD_RES (13)..(13): aza-Glycine
  MOD_RES (14)..(14): Hydroxyproline
  MOD_RES (16)..(16): aza-Glycine
  MOD_RES (17)..(17): Hydroxyproline
  MOD_RES (19)..(19): aza-Glycine
  MOD_RES (20)..(20): Hydroxyproline
  MOD_RES (22)..(22): aza-Glycine
  MOD_RES (23)..(23): Hydroxyproline
  MOD_RES (25)..(25): aza-Glycine
  MOD_RES (26)..(26): Hydroxyproline
  MOD_RES (28)..(28): aza-Glycine
  MOD_RES (29)..(29): Hydroxyproline
  MOD_RES (31)..(31): aza-Glycine
  MOD_RES (32)..(32): Hydroxyproline
  MOD_RES (34)..(34): aza-Glycine
  MOD_RES (35)..(35): Hydroxyproline
  MOD_RES (37)..(37): aza-Glycine
  MOD_RES (38)..(38): Hydroxyproline
  MOD_RES (40)..(40): aza-Glycine
  MOD_RES (41)..(41): Hydroxyproline
  MOD_RES (43)..(43): aza-Glycine
  MOD_RES (44)..(44): Hydroxyproline
  MOD_RES (46)..(46): aza-Glycine
  MOD_RES (47)..(47): Hydroxyproline
  MOD_RES (49)..(49): aza-Glycine
  MOD_RES (50)..(50): Hydroxyproline
  MOD_RES (52)..(52): aza-Glycine
  MOD_RES (53)..(53): Hydroxyproline
  MOD_RES (55)..(55): aza-Glycine
  MOD_RES (56)..(56): Hydroxyproline
  MOD_RES (58)..(58): aza-Glycine
  MOD_RES (59)..(59): Hydroxyproline
  SITE (1)..(60): This sequence may encompass 3-20 "azG-O-Pro" repeating units, wherein azG is aza-glycine and O is Hydroxyproline

SEQ ID NO: 349 - protein, 60 aa, Artificial Sequence; identical to SEQ ID NO: 338
  Description of Artificial Sequence: Synthetic polypeptide
  MOD_RES (1)..(1): aza-Glycine
  MOD_RES (3)..(3): 2S, 4S-4-fluoroproline
  MOD_RES (4)..(4): aza-Glycine
  MOD_RES (6)..(6): 2S, 4S-4-fluoroproline
  MOD_RES (7)..(7): aza-Glycine
  MOD_RES (9)..(9): 2S, 4S-4-fluoroproline
  MOD_RES (10)..(10): aza-Glycine
  MOD_RES (12)..(12): 2S, 4S-4-fluoroproline
  MOD_RES (13)..(13): aza-Glycine
  MOD_RES (15)..(15): 2S, 4S-4-fluoroproline
  MOD_RES (16)..(16): aza-Glycine
  MOD_RES (18)..(18): 2S, 4S-4-fluoroproline
  MOD_RES (19)..(19): aza-Glycine
  MOD_RES (21)..(21): 2S, 4S-4-fluoroproline
  MOD_RES (22)..(22): aza-Glycine
  MOD_RES (24)..(24): 2S, 4S-4-fluoroproline
  MOD_RES (25)..(25): aza-Glycine
  MOD_RES (27)..(27): 2S, 4S-4-fluoroproline
  MOD_RES (28)..(28): aza-Glycine
  MOD_RES (30)..(30): 2S, 4S-4-fluoroproline
  MOD_RES (31)..(31): aza-Glycine
  MOD_RES (33)..(33): 2S, 4S-4-fluoroproline
  MOD_RES (34)..(34): aza-Glycine
  MOD_RES (36)..(36): 2S, 4S-4-fluoroproline
  MOD_RES (37)..(37): aza-Glycine
  MOD_RES (39)..(39): 2S, 4S-4-fluoroproline
  MOD_RES (40)..(40): aza-Glycine
  MOD_RES (42)..(42): 2S, 4S-4-fluoroproline
  MOD_RES (43)..(43): aza-Glycine
  MOD_RES (45)..(45): 2S, 4S-4-fluoroproline
  MOD_RES (46)..(46): aza-Glycine
  MOD_RES (48)..(48): 2S, 4S-4-fluoroproline
  MOD_RES (49)..(49): aza-Glycine
  MOD_RES (51)..(51): 2S, 4S-4-fluoroproline
  MOD_RES (52)..(52): aza-Glycine
  MOD_RES (54)..(54): 2S, 4S-4-fluoroproline
  MOD_RES (55)..(55): aza-Glycine
  MOD_RES (57)..(57): 2S, 4S-4-fluoroproline
  MOD_RES (58)..(58): aza-Glycine
  MOD_RES (60)..(60): 2S, 4S-4-fluoroproline
  SITE (1)..(60): This sequence may encompass 3-20 "azG-Pro-F" repeating units, wherein azG is aza-glycine and F is 2S, 4S-4-fluoroproline

SEQ ID NO: 350 - protein, 7 aa, Artificial Sequence
  Description of Artificial Sequence: Synthetic peptide
GPPGPQG

SEQ ID NO: 351 - protein, 12 aa, Artificial Sequence
  Description of Artificial Sequence: Synthetic peptide
  MOD_RES (2)..(2): Proline, modified Proline, or Hydroxyproline
  MOD_RES (3)..(3): Proline, modified Proline, or Hydroxyproline
  MOD_RES (5)..(5): Proline, modified Proline, or Hydroxyproline
  MOD_RES (6)..(6): Proline, modified Proline, or Hydroxyproline
  MOD_RES (8)..(8): Proline, modified Proline, or Hydroxyproline
  MOD_RES (9)..(9): Proline, modified Proline, or Hydroxyproline
  MOD_RES (11)..(11): Proline, modified Proline, or Hydroxyproline
  MOD_RES (12)..(12): Proline, modified Proline, or Hydroxyproline
GXXGXXGXXGXX

SEQ ID NO: 352 - protein, 60 aa, Artificial Sequence
  Description of Artificial Sequence: Synthetic polypeptide
  MOD_RES (2)..(2): Proline, modified Proline, or Hydroxyproline
  MOD_RES (3)..(3): Proline, modified Proline, or Hydroxyproline
  MOD_RES (5)..(5): Proline, modified Proline, or Hydroxyproline
  MOD_RES (6)..(6): Proline, modified Proline, or Hydroxyproline
  MOD_RES (8)..(8): Proline, modified Proline, or Hydroxyproline
  MOD_RES (9)..(9): Proline, modified Proline, or Hydroxyproline
  MOD_RES (11)..(11): Proline, modified Proline, or Hydroxyproline
  MOD_RES (12)..(12): Proline, modified Proline, or Hydroxyproline
  MOD_RES (14)..(14): Proline, modified Proline, or Hydroxyproline
  MOD_RES (15)..(15): Proline, modified Proline, or Hydroxyproline
  MOD_RES (17)..(17): Proline, modified Proline, or Hydroxyproline
  MOD_RES (18)..(18): Proline, modified Proline, or Hydroxyproline
  MOD_RES (20)..(20): Proline, modified Proline, or Hydroxyproline
  MOD_RES (21)..(21): Proline, modified Proline, or Hydroxyproline
  MOD_RES (23)..(23): Proline, modified Proline, or Hydroxyproline
  MOD_RES (24)..(24): Proline, modified Proline, or Hydroxyproline
  MOD_RES (26)..(26): Proline, modified Proline, or Hydroxyproline
  MOD_RES (27)..(27): Proline, modified Proline, or Hydroxyproline
  MOD_RES (29)..(29): Proline, modified Proline, or Hydroxyproline
  MOD_RES (30)..(30): Proline, modified Proline, or Hydroxyproline
  MOD_RES (32)..(32): Proline, modified Proline, or Hydroxyproline
  MOD_RES (33)..(33): Proline, modified Proline, or Hydroxyproline
  MOD_RES (35)..(35): Proline, modified Proline, or Hydroxyproline
  MOD_RES (36)..(36): Proline, modified Proline, or Hydroxyproline
  MOD_RES (38)..(38): Proline, modified Proline, or Hydroxyproline
  MOD_RES (39)..(39): Proline, modified Proline, or Hydroxyproline
  MOD_RES (41)..(41): Proline, modified Proline, or Hydroxyproline
  MOD_RES (42)..(42): Proline, modified Proline, or Hydroxyproline
  MOD_RES (44)..(44): Proline, modified Proline, or Hydroxyproline
  MOD_RES (45)..(45): Proline, modified Proline, or Hydroxyproline
  MOD_RES (47)..(47): Proline, modified Proline, or Hydroxyproline
  MOD_RES (48)..(48): Proline, modified Proline, or Hydroxyproline
  MOD_RES (50)..(50): Proline, modified Proline, or Hydroxyproline
  MOD_RES (51)..(51): Proline, modified Proline, or Hydroxyproline
  MOD_RES (53)..(53): Proline, modified Proline, or Hydroxyproline
  MOD_RES (54)..(54): Proline, modified Proline, or Hydroxyproline
  MOD_RES (56)..(56): Proline, modified Proline, or Hydroxyproline
  MOD_RES (57)..(57): Proline, modified Proline, or Hydroxyproline
  MOD_RES (59)..(59): Proline, modified Proline, or Hydroxyproline
  MOD_RES (60)..(60): Proline, modified Proline, or Hydroxyproline
  SITE (1)..(60): This region may encompass 3-20 "Gly-X-Y" repeating units, wherein X is Proline, modified Proline, or Hydroxyproline and Y isProline, modified Proline, or Hydroxyproline
GXXGXXGXXGXXGXXGXXGXXGXXGXXGXXGXXGXXGXXGXXGXXGXXGXXGXXGXXGXX

SEQ ID NO: 353 - protein, 27 aa, Artificial Sequence
  Description of Artificial Sequence: Synthetic peptide
  MOD_RES (2)..(2): Proline, modified Proline, or Hydroxyproline
  MOD_RES (3)..(3): Hydroxyproline
  MOD_RES (5)..(5): Proline, modified Proline, or Hydroxyproline
  MOD_RES (6)..(6): Hydroxyproline
  MOD_RES (8)..(8): Proline, modified Proline, or Hydroxyproline
  MOD_RES (9)..(9): Hydroxyproline
  MOD_RES (11)..(11): Proline, modified Proline, or Hydroxyproline
  MOD_RES (12)..(12): Hydroxyproline
  MOD_RES (14)..(14): Proline, modified Proline, or Hydroxyproline
  MOD_RES (15)..(15): Hydroxyproline
  MOD_RES (17)..(17): Proline, modified Proline, or Hydroxyproline
  MOD_RES (18)..(18): Hydroxyproline
  MOD_RES (20)..(20): Proline, modified Proline, or Hydroxyproline
  MOD_RES (21)..(21): Hydroxyproline
  MOD_RES (23)..(23): Proline, modified Proline, or Hydroxyproline
  MOD_RES (24)..(24): Hydroxyproline
  MOD_RES (26)..(26): Proline, modified Proline, or Hydroxyproline
  MOD_RES (27)..(27): Hydroxyproline
GXPGXPGXPGXPGXPGXPGXPGXPGXP

SEQ ID NO: 354 - protein, 15 aa, Artificial Sequence
  Description of Artificial Sequence: Synthetic peptide
  MOD_RES (2)..(2): Proline, modified Proline, or Hydroxyproline
  MOD_RES (3)..(3): Proline, modified Proline, or Hydroxyproline
  MOD_RES (5)..(5): Proline, modified Proline, or Hydroxyproline
  MOD_RES (6)..(6): Proline, modified Proline, or Hydroxyproline
  MOD_RES (8)..(8): Proline, modified Proline, or Hydroxyproline
  MOD_RES (9)..(9): Proline, modified Proline, or Hydroxyproline
  MOD_RES (11)..(11): Proline, modified Proline, or Hydroxyproline
  MOD_RES (12)..(12): Proline, modified Proline, or Hydroxyproline
  MOD_RES (14)..(14): Proline, modified Proline, or Hydroxyproline
  MOD_RES (15)..(15): Proline, modified Proline, or Hydroxyproline
GXXGXXGXXGXXGXX

SEQ ID NO: 355 - protein, 18 aa, Artificial Sequence
  Description of Artificial Sequence: Synthetic peptide
  MOD_RES (2)..(2): Proline, modified Proline, or Hydroxyproline
  MOD_RES (3)..(3): Proline, modified Proline, or Hydroxyproline
  MOD_RES (5)..(5): Proline, modified Proline, or Hydroxyproline
  MOD_RES (6)..(6): Proline, modified Proline, or Hydroxyproline
  MOD_RES (8)..(8): Proline, modified Proline, or Hydroxyproline
  MOD_RES (9)..(9): Proline, modified Proline, or Hydroxyproline
  MOD_RES (11)..(11): Proline, modified Proline, or Hydroxyproline
  MOD_RES (12)..(12): Proline, modified Proline, or Hydroxyproline
  MOD_RES (14)..(14): Proline, modified Proline, or Hydroxyproline
  MOD_RES (15)..(15): Proline, modified Proline, or Hydroxyproline
  MOD_RES (17)..(17): Proline, modified Proline, or Hydroxyproline
  MOD_RES (18)..(18): Proline, modified Proline, or Hydroxyproline
GXXGXXGXXGXXGXXGXX

SEQ ID NO: 356 - protein, 21 aa, Artificial Sequence
  Description of Artificial Sequence: Synthetic peptide
  MOD_RES (2)..(2): Proline, modified Proline, or Hydroxyproline
  MOD_RES (3)..(3): Proline, modified Proline, or Hydroxyproline
  MOD_RES (5)..(5): Proline, modified Proline, or Hydroxyproline
  MOD_RES (6)..(6): Proline, modified Proline, or Hydroxyproline
  MOD_RES (8)..(8): Proline, modified Proline, or Hydroxyproline
  MOD_RES (9)..(9): Proline, modified Proline, or Hydroxyproline
  MOD_RES (11)..(11): Proline, modified Proline, or Hydroxyproline
  MOD_RES (12)..(12): Proline, modified Proline, or Hydroxyproline
  MOD_RES (14)..(14): Proline, modified Proline, or Hydroxyproline
  MOD_RES (15)..(15): Proline, modified Proline, or Hydroxyproline
  MOD_RES (17)..(17): Proline, modified Proline, or Hydroxyproline
  MOD_RES (18)..(18): Proline, modified Proline, or Hydroxyproline
  MOD_RES (20)..(20): Proline, modified Proline, or Hydroxyproline
  MOD_RES (21)..(21): Proline, modified Proline, or Hydroxyproline
GXXGXXGXXGXXGXXGXXGXX

SEQ ID NO: 357 - protein, 24 aa, Artificial Sequence
  Description of Artificial Sequence: Synthetic peptide
  MOD_RES (2)..(2): Proline, modified Proline, or Hydroxyproline
  MOD_RES (3)..(3): Proline, modified Proline, or Hydroxyproline
  MOD_RES (5)..(5): Proline, modified Proline, or Hydroxyproline
  MOD_RES (6)..(6): Proline, modified Proline, or Hydroxyproline
  MOD_RES (8)..(8): Proline, modified Proline, or Hydroxyproline
  MOD_RES (9)..(9): Proline, modified Proline, or Hydroxyproline
  MOD_RES (11)..(11): Proline, modified Proline, or Hydroxyproline
  MOD_RES (12)..(12): Proline, modified Proline, or Hydroxyproline
  MOD_RES (14)..(14): Proline, modified Proline, or Hydroxyproline
  MOD_RES (15)..(15): Proline, modified Proline, or Hydroxyproline
  MOD_RES (17)..(17): Proline, modified Proline, or Hydroxyproline
  MOD_RES (18)..(18): Proline, modified Proline, or Hydroxyproline
  MOD_RES (20)..(20): Proline, modified Proline, or Hydroxyproline
  MOD_RES (21)..(21): Proline, modified Proline, or Hydroxyproline
  MOD_RES (23)..(23): Proline, modified Proline, or Hydroxyproline
  MOD_RES (24)..(24): Proline, modified Proline, or Hydroxyproline
GXXGXXGXXGXXGXXGXXGXXGXX

SEQ ID NO: 358 - protein, 27 aa, Artificial Sequence
  Description of Artificial Sequence: Synthetic peptide
  MOD_RES (2)..(2): Proline, modified Proline, or Hydroxyproline
  MOD_RES (3)..(3): Proline, modified Proline, or Hydroxyproline
  MOD_RES (5)..(5): Proline, modified Proline, or Hydroxyproline
  MOD_RES (6)..(6): Proline, modified Proline, or Hydroxyproline
  MOD_RES (8)..(8): Proline, modified Proline, or Hydroxyproline
  MOD_RES (9)..(9): Proline, modified Proline, or Hydroxyproline
  MOD_RES (11)..(11): Proline, modified Proline, or Hydroxyproline
  MOD_RES (12)..(12): Proline, modified Proline, or Hydroxyproline
  MOD_RES (14)..(14): Proline, modified Proline, or Hydroxyproline
  MOD_RES (15)..(15): Proline, modified Proline, or Hydroxyproline
  MOD_RES (17)..(17): Proline, modified Proline, or Hydroxyproline
  MOD_RES (18)..(18): Proline, modified Proline, or Hydroxyproline
  MOD_RES (20)..(20): Proline, modified Proline, or Hydroxyproline
  MOD_RES (21)..(21): Proline, modified Proline, or Hydroxyproline
  MOD_RES (23)..(23): Proline, modified Proline, or Hydroxyproline
  MOD_RES (24)..(24): Proline, modified Proline, or Hydroxyproline
  MOD_RES (26)..(26): Proline, modified Proline, or Hydroxyproline
  MOD_RES (27)..(27): Proline, modified Proline, or Hydroxyproline
GXXGXXGXXGXXGXXGXXGXXGXXGXX

SEQ ID NO: 359 - protein, 30 aa, Artificial Sequence
  Description of Artificial Sequence: Synthetic polypeptide
  MOD_RES (2)..(2): Proline, modified Proline, or Hydroxyproline
  MOD_RES (3)..(3): Proline, modified Proline, or Hydroxyproline
  MOD_RES (5)..(5): Proline, modified Proline, or Hydroxyproline
  MOD_RES (6)..(6): Proline, modified Proline, or Hydroxyproline
  MOD_RES (8)..(8): Proline, modified Proline, or Hydroxyproline
  MOD_RES (9)..(9): Proline, modified Proline, or Hydroxyproline
  MOD_RES (11)..(11): Proline, modified Proline, or Hydroxyproline
  MOD_RES (12)..(12): Proline, modified Proline, or Hydroxyproline
  MOD_RES (14)..(14): Proline, modified Proline, or Hydroxyproline
  MOD_RES (15)..(15): Proline, modified Proline, or Hydroxyproline
  MOD_RES (17)..(17): Proline, modified Proline, or Hydroxyproline
  MOD_RES (18)..(18): Proline, modified Proline, or Hydroxyproline
  MOD_RES (20)..(20): Proline, modified Proline, or Hydroxyproline
  MOD_RES (21)..(21): Proline, modified Proline, or Hydroxyproline
  MOD_RES (23)..(23): Proline, modified Proline, or Hydroxyproline
  MOD_RES (24)..(24): Proline, modified Proline, or Hydroxyproline
  MOD_RES (26)..(26): Proline, modified Proline, or Hydroxyproline
  MOD_RES (27)..(27): Proline, modified Proline, or Hydroxyproline
  MOD_RES (29)..(29): Proline, modified Proline, or Hydroxyproline
  MOD_RES (30)..(30): Proline, modified Proline, or Hydroxyproline
GXXGXXGXXGXXGXXGXXGXXGXXGXXGXX

SEQ ID NO: 360 - protein, 33 aa, Artificial Sequence
  Description of Artificial Sequence: Synthetic polypeptide
  MOD_RES (2)..(2): Proline, modified Proline, or Hydroxyproline
  MOD_RES (3)..(3): Proline, modified Proline, or Hydroxyproline
  MOD_RES (5)..(5): Proline, modified Proline, or Hydroxyproline
  MOD_RES (6)..(6): Proline, modified Proline, or Hydroxyproline
  MOD_RES (8)..(8): Proline, modified Proline, or Hydroxyproline
  MOD_RES (9)..(9): Proline, modified Proline, or Hydroxyproline
  MOD_RES (11)..(11): Proline, modified Proline, or Hydroxyproline
  MOD_RES (12)..(12): Proline, modified Proline, or Hydroxyproline
  MOD_RES (14)..(14): Proline, modified Proline, or Hydroxyproline
  MOD_RES (15)..(15): Proline, modified Proline, or Hydroxyproline
  MOD_RES (17)..(17): Proline, modified Proline, or Hydroxyproline
  MOD_RES (18)..(18): Proline, modified Proline, or Hydroxyproline
  MOD_RES (20)..(20): Proline, modified Proline, or Hydroxyproline
  MOD_RES (21)..(21): Proline, modified Proline, or Hydroxyproline
  MOD_RES (23)..(23): Proline, modified Proline, or Hydroxyproline
  MOD_RES (24)..(24): Proline, modified Proline, or Hydroxyproline
  MOD_RES (26)..(26): Proline, modified Proline, or Hydroxyproline
  MOD_RES (27)..(27): Proline, modified Proline, or Hydroxyproline
  MOD_RES (29)..(29): Proline, modified Proline, or Hydroxyproline
  MOD_RES (30)..(30): Proline, modified Proline, or Hydroxyproline
  MOD_RES (32)..(32): Proline, modified Proline, or Hydroxyproline
  MOD_RES (33)..(33): Proline, modified Proline, or Hydroxyproline
GXXGXXGXXGXXGXXGXXGXXGXXGXXGXXGXX

SEQ ID NO: 361 - protein, 36 aa, Artificial Sequence
  Description of Artificial Sequence: Synthetic polypeptide
  MOD_RES (2)..(2): Proline, modified Proline, or Hydroxyproline
  MOD_RES (3)..(3): Proline, modified Proline, or Hydroxyproline
  MOD_RES (5)..(5): Proline, modified Proline, or Hydroxyproline
  MOD_RES (6)..(6): Proline, modified Proline, or Hydroxyproline
  MOD_RES (8)..(8): Proline, modified Proline, or Hydroxyproline
  MOD_RES (9)..(9): Proline, modified Proline, or Hydroxyproline
  MOD_RES (11)..(11): Proline, modified Proline, or Hydroxyproline
  MOD_RES (12)..(12): Proline, modified Proline, or Hydroxyproline
  MOD_RES (14)..(14): Proline, modified Proline, or Hydroxyproline
  MOD_RES (15)..(15): Proline, modified Proline, or Hydroxyproline
  MOD_RES (17)..(17): Proline, modified Proline, or Hydroxyproline
  MOD_RES (18)..(18): Proline, modified Proline, or Hydroxyproline
  MOD_RES (20)..(20): Proline, modified Proline, or Hydroxyproline
  MOD_RES (21)..(21): Proline, modified Proline, or Hydroxyproline
  MOD_RES (23)..(23): Proline, modified Proline, or Hydroxyproline
  MOD_RES (24)..(24): Proline, modified Proline, or Hydroxyproline
  MOD_RES (26)..(26): Proline, modified Proline, or Hydroxyproline
  MOD_RES (27)..(27): Proline, modified Proline, or Hydroxyproline
  MOD_RES (29)..(29): Proline, modified Proline, or Hydroxyproline
  MOD_RES (30)..(30): Proline, modified Proline, or Hydroxyproline
  MOD_RES (32)..(32): Proline, modified Proline, or Hydroxyproline
  MOD_RES (33)..(33): Proline, modified Proline, or Hydroxyproline
  MOD_RES (35)..(35): Proline, modified Proline, or Hydroxyproline
  MOD_RES (36)..(36): Proline, modified Proline, or Hydroxyproline
GXXGXXGXXGXXGXXGXXGXXGXXGXXGXXGXXGXX

SEQ ID NO: 362 - protein, 39 aa, Artificial Sequence
  Description of Artificial Sequence: Synthetic polypeptide
  MOD_RES (2)..(2): Proline, modified Proline, or Hydroxyproline
  MOD_RES (3)..(3): Proline, modified Proline, or Hydroxyproline
  MOD_RES (5)..(5): Proline, modified Proline, or Hydroxyproline
  MOD_RES (6)..(6): Proline, modified Proline, or Hydroxyproline
  MOD_RES (8)..(8): Proline, modified Proline, or Hydroxyproline
  MOD_RES (9)..(9): Proline, modified Proline, or Hydroxyproline
  MOD_RES (11)..(11): Proline, modified Proline, or Hydroxyproline
  MOD_RES (12)..(12): Proline, modified Proline, or Hydroxyproline
  MOD_RES (14)..(14): Proline, modified Proline, or Hydroxyproline
  MOD_RES (15)..(15): Proline, modified Proline, or Hydroxyproline
  MOD_RES (17)..(17): Proline, modified Proline, or Hydroxyproline
  MOD_RES (18)..(18): Proline, modified Proline, or Hydroxyproline
  MOD_RES (20)..(20): Proline, modified Proline, or Hydroxyproline
  MOD_RES (21)..(21): Proline, modified Proline, or Hydroxyproline
  MOD_RES (23)..(23): Proline, modified Proline, or Hydroxyproline
  MOD_RES (24)..(24): Proline, modified Proline, or Hydroxyproline
  MOD_RES (26)..(26): Proline, modified Proline, or Hydroxyproline
  MOD_RES (27)..(27): Proline, modified Proline, or Hydroxyproline
  MOD_RES (29)..(29): Proline, modified Proline, or Hydroxyproline
  MOD_RES (30)..(30): Proline, modified Proline, or Hydroxyproline
  MOD_RES (32)..(32): Proline, modified Proline, or Hydroxyproline
  MOD_RES (33)..(33): Proline, modified Proline, or Hydroxyproline
  MOD_RES (35)..(35): Proline, modified Proline, or Hydroxyproline
  MOD_RES (36)..(36): Proline, modified Proline, or Hydroxyproline
  MOD_RES (38)..(38): Proline, modified Proline, or Hydroxyproline
  MOD_RES (39)..(39): Proline, modified Proline, or Hydroxyproline
GXXGXXGXXGXXGXXGXXGXXGXXGXXGXXGXXGXXGXX

SEQ ID NO: 363 - protein, 42 aa, Artificial Sequence
  Description of Artificial Sequence: Synthetic polypeptide
  MOD_RES (2)..(2): Proline, modified Proline, or Hydroxyproline
  MOD_RES (3)..(3): Proline, modified Proline, or Hydroxyproline
  MOD_RES (5)..(5): Proline, modified Proline, or Hydroxyproline
  MOD_RES (6)..(6): Proline, modified Proline, or Hydroxyproline
  MOD_RES (8)..(8): Proline, modified Proline, or Hydroxyproline
  MOD_RES (9)..(9): Proline, modified Proline, or Hydroxyproline
  MOD_RES (11)..(11): Proline, modified Proline, or Hydroxyproline
  MOD_RES (12)..(12): Proline, modified Proline, or Hydroxyproline
  MOD_RES (14)..(14): Proline, modified Proline, or Hydroxyproline
  MOD_RES (15)..(15): Proline, modified Proline, or Hydroxyproline
  MOD_RES (17)..(17): Proline, modified Proline, or Hydroxyproline
  MOD_RES (18)..(18): Proline, modified Proline, or Hydroxyproline
  MOD_RES (20)..(20): Proline, modified Proline, or Hydroxyproline
  MOD_RES (21)..(21): Proline, modified Proline, or Hydroxyproline
  MOD_RES (23)..(23): Proline, modified Proline, or Hydroxyproline
  MOD_RES (24)..(24): Proline, modified Proline, or Hydroxyproline
  MOD_RES (26)..(26): Proline, modified Proline, or Hydroxyproline
  MOD_RES (27)..(27): Proline, modified Proline, or Hydroxyproline
  MOD_RES (29)..(29): Proline, modified Proline, or Hydroxyproline
  MOD_RES (30)..(30): Proline, modified Proline, or Hydroxyproline
  MOD_RES (32)..(32): Proline, modified Proline, or Hydroxyproline
  MOD_RES (33)..(33): Proline, modified Proline, or Hydroxyproline
  MOD_RES (35)..(35): Proline, modified Proline, or Hydroxyproline
  MOD_RES (36)..(36): Proline, modified Proline, or Hydroxyproline
  MOD_RES (38)..(38): Proline, modified Proline, or Hydroxyproline
  MOD_RES (39)..(39): Proline, modified Proline, or Hydroxyproline
  MOD_RES (41)..(41): Proline, modified Proline, or Hydroxyproline
  MOD_RES (42)..(42): Proline, modified Proline, or Hydroxyproline
GXXGXXGXXGXXGXXGXXGXXGXXGXXGXXGXXGXXGXXGXX

SEQ ID NO: 364 - protein, 45 aa, Artificial Sequence
  Description of Artificial Sequence: Synthetic polypeptide
  MOD_RES (2)..(2): Proline, modified Proline, or Hydroxyproline
  MOD_RES (3)..(3): Proline, modified Proline, or Hydroxyproline
  MOD_RES (5)..(5): Proline, modified Proline, or Hydroxyproline
  MOD_RES (6)..(6): Proline, modified Proline, or Hydroxyproline
  MOD_RES (8)..(8): Proline, modified Proline, or Hydroxyproline
  MOD_RES (9)..(9): Proline, modified Proline, or Hydroxyproline
  MOD_RES (11)..(11): Proline, modified Proline, or Hydroxyproline
  MOD_RES (12)..(12): Proline, modified Proline, or Hydroxyproline
  MOD_RES (14)..(14): Proline, modified Proline, or Hydroxyproline
  MOD_RES (15)..(15): Proline, modified Proline, or Hydroxyproline
  MOD_RES (17)..(17): Proline, modified Proline, or Hydroxyproline
  MOD_RES (18)..(18): Proline, modified Proline, or Hydroxyproline
  MOD_RES (20)..(20): Proline, modified Proline, or Hydroxyproline
  MOD_RES (21)..(21): Proline, modified Proline, or Hydroxyproline
  MOD_RES (23)..(23): Proline, modified Proline, or Hydroxyproline
  MOD_RES (24)..(24): Proline, modified Proline, or Hydroxyproline
  MOD_RES (26)..(26): Proline, modified Proline, or Hydroxyproline
  MOD_RES (27)..(27): Proline, modified Proline, or Hydroxyproline
  MOD_RES (29)..(29): Proline, modified Proline, or Hydroxyproline
  MOD_RES (30)..(30): Proline, modified Proline, or Hydroxyproline
  MOD_RES (32)..(32): Proline, modified Proline, or Hydroxyproline
  MOD_RES (33)..(33): Proline, modified Proline, or Hydroxyproline
  MOD_RES (35)..(35): Proline, modified Proline, or Hydroxyproline
  MOD_RES (36)..(36): Proline, modified Proline, or Hydroxyproline
  MOD_RES (38)..(38): Proline, modified Proline, or Hydroxyproline
  MOD_RES (39)..(39): Proline, modified Proline, or Hydroxyproline
  MOD_RES (41)..(41): Proline, modified Proline, or Hydroxyproline
  MOD_RES (42)..(42): Proline, modified Proline, or Hydroxyproline
  MOD_RES (44)..(44): Proline, modified Proline, or Hydroxyproline
  MOD_RES (45)..(45): Proline, modified Proline, or Hydroxyproline
GXXGXXGXXGXXGXXGXXGXXGXXGXXGXXGXXGXXGXXGXXGXX

SEQ ID NO: 365 - protein, 48 aa, Artificial Sequence
  Description of Artificial Sequence: Synthetic polypeptide
  MOD_RES (2)..(2): Proline, modified Proline, or Hydroxyproline
  MOD_RES (3)..(3): Proline, modified Proline, or Hydroxyproline
  MOD_RES (5)..(5): Proline, modified Proline, or Hydroxyproline
  MOD_RES (6)..(6): Proline, modified Proline, or Hydroxyproline
  MOD_RES (8)..(8): Proline, modified Proline, or Hydroxyproline
  MOD_RES (9)..(9): Proline, modified Proline, or Hydroxyproline
  MOD_RES (11)..(11): Proline, modified Proline, or Hydroxyproline
  MOD_RES (12)..(12): Proline, modified Proline, or Hydroxyproline
  MOD_RES (14)..(14): Proline, modified Proline, or Hydroxyproline
  MOD_RES (15)..(15): Proline, modified Proline, or Hydroxyproline
  MOD_RES (17)..(17): Proline, modified Proline, or Hydroxyproline
  MOD_RES (18)..(18): Proline, modified Proline, or Hydroxyproline
  MOD_RES (20)..(20): Proline, modified Proline, or Hydroxyproline
  MOD_RES (21)..(21): Proline, modified Proline, or Hydroxyproline
  MOD_RES (23)..(23): Proline, modified Proline, or Hydroxyproline
  MOD_RES (24)..(24): Proline, modified Proline, or Hydroxyproline
  MOD_RES (26)..(26): Proline, modified Proline, or Hydroxyproline
  MOD_RES (27)..(27): Proline, modified Proline, or Hydroxyproline
  MOD_RES (29)..(29): Proline, modified Proline, or Hydroxyproline
  MOD_RES (30)..(30): Proline, modified Proline, or Hydroxyproline
  MOD_RES (32)..(32): Proline, modified Proline, or Hydroxyproline
  MOD_RES (33)..(33): Proline, modified Proline, or Hydroxyproline
  MOD_RES (35)..(35): Proline, modified Proline, or Hydroxyproline
  MOD_RES (36)..(36): Proline, modified Proline, or Hydroxyproline
  MOD_RES (38)..(38): Proline, modified Proline, or Hydroxyproline
  MOD_RES (39)..(39): Proline, modified Proline, or Hydroxyproline
  MOD_RES (41)..(41): Proline, modified Proline, or Hydroxyproline
  MOD_RES (42)..(42): Proline, modified Proline, or Hydroxyproline
  MOD_RES (44)..(44): Proline, modified Proline, or Hydroxyproline
  MOD_RES (45)..(45): Proline, modified Proline, or Hydroxyproline
  MOD_RES (47)..(47): Proline, modified Proline, or Hydroxyproline
  MOD_RES (48)..(48): Proline, modified Proline, or Hydroxyproline
GXXGXXGXXGXXGXXGXXGXXGXXGXXGXXGXXGXXGXXGXXGXXGXX

SEQ ID NO: 366 - protein, 51 aa, Artificial Sequence
  Description of Artificial Sequence: Synthetic polypeptide
  MOD_RES (2)..(2): Proline, modified Proline, or Hydroxyproline
  MOD_RES (3)..(3): Proline, modified Proline, or Hydroxyproline
  MOD_RES (5)..(5): Proline, modified Proline, or Hydroxyproline
  MOD_RES (6)..(6): Proline, modified Proline, or Hydroxyproline
  MOD_RES (8)..(8): Proline, modified Proline, or Hydroxyproline
  MOD_RES (9)..(9): Proline, modified Proline, or Hydroxyproline
  MOD_RES (11)..(11): Proline, modified Proline, or Hydroxyproline
  MOD_RES (12)..(12): Proline, modified Proline, or Hydroxyproline
  MOD_RES (14)..(14): Proline, modified Proline, or Hydroxyproline
  MOD_RES (15)..(15): Proline, modified Proline, or Hydroxyproline
  MOD_RES (17)..(17): Proline, modified Proline, or Hydroxyproline
  MOD_RES (18)..(18): Proline, modified Proline, or Hydroxyproline
  MOD_RES (20)..(20): Proline, modified Proline, or Hydroxyproline
  MOD_RES (21)..(21): Proline, modified Proline, or Hydroxyproline
  MOD_RES (23)..(23): Proline, modified Proline, or Hydroxyproline
  MOD_RES (24)..(24): Proline, modified Proline, or Hydroxyproline
  MOD_RES (26)..(26): Proline, modified Proline, or Hydroxyproline
  MOD_RES (27)..(27): Proline, modified Proline, or Hydroxyproline
  MOD_RES (29)..(29): Proline, modified Proline, or Hydroxyproline
  MOD_RES (30)..(30): Proline, modified Proline, or Hydroxyproline
  MOD_RES (32)..(32): Proline, modified Proline, or Hydroxyproline
  MOD_RES (33)..(33): Proline, modified Proline, or Hydroxyproline
  MOD_RES (35)..(35): Proline, modified Proline, or Hydroxyproline
  MOD_RES (36)..(36): Proline, modified Proline, or Hydroxyproline
  MOD_RES (38)..(38): Proline, modified Proline, or Hydroxyproline
  MOD_RES (39)..(39): Proline, modified Proline, or Hydroxyproline
  MOD_RES (41)..(41): Proline, modified Proline, or Hydroxyproline
  MOD_RES (42)..(42): Proline, modified Proline, or Hydroxyproline
  MOD_RES (44)..(44): Proline, modified Proline, or Hydroxyproline
  MOD_RES (45)..(45): Proline, modified Proline, or Hydroxyproline
  MOD_RES (47)..(47): Proline, modified Proline, or Hydroxyproline
  MOD_RES (48)..(48): Proline, modified Proline, or Hydroxyproline
  MOD_RES (50)..(50): Proline, modified Proline, or Hydroxyproline
  MOD_RES (51)..(51): Proline, modified Proline, or Hydroxyproline
GXXGXXGXXGXXGXXGXXGXXGXXGXXGXXGXXGXXGXXGXXGXXGXXGXX

SEQ ID NO: 367 - protein, 54 aa, Artificial Sequence
  Description of Artificial Sequence: Synthetic polypeptide
  MOD_RES (2)..(2): Proline, modified Proline, or Hydroxyproline
  MOD_RES (3)..(3): Proline, modified Proline, or Hydroxyproline
  MOD_RES (5)..(5): Proline, modified Proline, or Hydroxyproline
  MOD_RES (6)..(6): Proline, modified Proline, or Hydroxyproline
  MOD_RES (8)..(8): Proline, modified Proline, or Hydroxyproline
  MOD_RES (9)..(9): Proline, modified Proline, or Hydroxyproline
  MOD_RES (11)..(11): Proline, modified Proline, or Hydroxyproline
  MOD_RES (12)..(12): Proline, modified Proline, or Hydroxyproline
  MOD_RES (14)..(14): Proline, modified Proline, or Hydroxyproline
  MOD_RES (15)..(15): Proline, modified Proline, or Hydroxyproline
  MOD_RES (17)..(17): Proline, modified Proline, or Hydroxyproline
  MOD_RES (18)..(18): Proline, modified Proline, or Hydroxyproline
  MOD_RES (20)..(20): Proline, modified Proline, or Hydroxyproline
  MOD_RES (21)..(21): Proline, modified Proline, or Hydroxyproline
  MOD_RES (23)..(23): Proline, modified Proline, or Hydroxyproline
  MOD_RES (24)..(24): Proline, modified Proline, or Hydroxyproline
  MOD_RES (26)..(26): Proline, modified Proline, or Hydroxyproline
  MOD_RES (27)..(27): Proline, modified Proline, or Hydroxyproline
  MOD_RES (29)..(29): Proline, modified Proline, or Hydroxyproline
  MOD_RES (30)..(30): Proline, modified Proline, or Hydroxyproline
  MOD_RES (32)..(32): Proline, modified Proline, or Hydroxyproline
  MOD_RES (33)..(33): Proline, modified Proline, or Hydroxyproline
  MOD_RES (35)..(35): Proline, modified Proline, or Hydroxyproline
  MOD_RES (36)..(36): Proline, modified Proline, or Hydroxyproline
  MOD_RES (38)..(38): Proline, modified Proline, or Hydroxyproline
  MOD_RES (39)..(39): Proline, modified Proline, or Hydroxyproline
  MOD_RES (41)..(41): Proline, modified Proline, or Hydroxyproline
  MOD_RES (42)..(42): Proline, modified Proline, or Hydroxyproline
  MOD_RES (44)..(44): Proline, modified Proline, or Hydroxyproline
  MOD_RES (45)..(45): Proline, modified Proline, or Hydroxyproline
  MOD_RES (47)..(47): Proline, modified Proline, or Hydroxyproline
  MOD_RES (48)..(48): Proline, modified Proline, or Hydroxyproline
  MOD_RES (50)..(50): Proline, modified Proline, or Hydroxyproline
  MOD_RES (51)..(51): Proline, modified Proline, or Hydroxyproline
  MOD_RES (53)..(53): Proline, modified Proline, or Hydroxyproline
  MOD_RES (54)..(54): Proline, modified Proline, or Hydroxyproline
GXXGXXGXXGXXGXXGXXGXXGXXGXXGXXGXXGXXGXXGXXGXXGXXGXXGXX

SEQ ID NO: 368 - protein, 57 aa, Artificial Sequence
  Description of Artificial Sequence: Synthetic polypeptide
  MOD_RES (2)..(2): Proline, modified Proline, or Hydroxyproline
  MOD_RES (3)..(3): Proline, modified Proline, or Hydroxyproline
  MOD_RES (5)..(5): Proline, modified Proline, or Hydroxyproline
  MOD_RES (6)..(6): Proline, modified Proline, or Hydroxyproline
  MOD_RES (8)..(8): Proline, modified Proline, or Hydroxyproline
  MOD_RES (9)..(9): Proline, modified Proline, or Hydroxyproline
  MOD_RES (11)..(11): Proline, modified Proline, or Hydroxyproline
  MOD_RES (12)..(12): Proline, modified Proline, or Hydroxyproline
  MOD_RES (14)..(14): Proline, modified Proline, or Hydroxyproline
  MOD_RES (15)..(15): Proline, modified Proline, or Hydroxyproline
  MOD_RES (17)..(17): Proline, modified Proline, or Hydroxyproline
  MOD_RES (18)..(18): Proline, modified Proline, or Hydroxyproline
  MOD_RES (20)..(20): Proline, modified Proline, or Hydroxyproline
  MOD_RES (21)..(21): Proline, modified Proline, or Hydroxyproline
  MOD_RES (23)..(23): Proline, modified Proline, or Hydroxyproline
  MOD_RES (24)..(24): Proline, modified Proline, or Hydroxyproline
  MOD_RES (26)..(26): Proline, modified Proline, or Hydroxyproline
  MOD_RES (27)..(27): Proline, modified Proline, or Hydroxyproline
  MOD_RES (29)..(29): Proline, modified Proline, or Hydroxyproline
  MOD_RES (30)..(30): Proline, modified Proline, or Hydroxyproline
  MOD_RES (32)..(32): Proline, modified Proline, or Hydroxyproline
  MOD_RES (33)..(33): Proline, modified Proline, or Hydroxyproline
  MOD_RES (35)..(35): Proline, modified Proline, or Hydroxyproline
  MOD_RES (36)..(36): Proline, modified Proline, or Hydroxyproline
  MOD_RES (38)..(38): Proline, modified Proline, or Hydroxyproline
  MOD_RES (39)..(39): Proline, modified Proline, or Hydroxyproline
  MOD_RES (41)..(41): Proline, modified Proline, or Hydroxyproline
  MOD_RES (42)..(42): Proline, modified Proline, or Hydroxyproline
  MOD_RES (44)..(44): Proline, modified Proline, or Hydroxyproline
  MOD_RES (45)..(45): Proline, modified Proline, or Hydroxyproline
  MOD_RES (47)..(47): Proline, modified Proline, or Hydroxyproline
  MOD_RES (48)..(48): Proline, modified Proline, or Hydroxyproline
  MOD_RES (50)..(50): Proline, modified Proline, or Hydroxyproline
  MOD_RES (51)..(51): Proline, modified Proline, or Hydroxyproline
  MOD_RES (53)..(53): Proline, modified Proline, or Hydroxyproline
  MOD_RES (54)..(54): Proline, modified Proline, or Hydroxyproline
  MOD_RES (56)..(56): Proline, modified Proline, or Hydroxyproline
  MOD_RES (57)..(57): Proline, modified Proline, or Hydroxyproline
GXXGXXGXXGXXGXXGXXGXXGXXGXXGXXGXXGXXGXXGXXGXXGXXGXXGXXGXX

SEQ ID NO: 369 - protein, 60 aa, Artificial Sequence; identical to SEQ ID NO: 352
  Description of Artificial Sequence: Synthetic polypeptide
  MOD_RES (2)..(2): Proline, modified Proline, or Hydroxyproline
  MOD_RES (3)..(3): Proline, modified Proline, or Hydroxyproline
  MOD_RES (5)..(5): Proline, modified Proline, or Hydroxyproline
  MOD_RES (6)..(6): Proline, modified Proline, or Hydroxyproline
  MOD_RES (8)..(8): Proline, modified Proline, or Hydroxyproline
  MOD_RES (9)..(9): Proline, modified Proline, or Hydroxyproline
  MOD_RES (11)..(11): Proline, modified Proline, or Hydroxyproline
  MOD_RES (12)..(12): Proline, modified Proline, or Hydroxyproline
  MOD_RES (14)..(14): Proline, modified Proline, or Hydroxyproline
  MOD_RES (15)..(15): Proline, modified Proline, or Hydroxyproline
  MOD_RES (17)..(17): Proline, modified Proline, or Hydroxyproline
  MOD_RES (18)..(18): Proline, modified Proline, or Hydroxyproline
  MOD_RES (20)..(20): Proline, modified Proline, or Hydroxyproline
  MOD_RES (21)..(21): Proline, modified Proline, or Hydroxyproline
  MOD_RES (23)..(23): Proline, modified Proline, or Hydroxyproline
  MOD_RES (24)..(24): Proline, modified Proline, or Hydroxyproline
  MOD_RES (26)..(26): Proline, modified Proline, or Hydroxyproline
  MOD_RES (27)..(27): Proline, modified Proline, or Hydroxyproline
  MOD_RES (29)..(29): Proline, modified Proline, or Hydroxyproline
  MOD_RES (30)..(30): Proline, modified Proline, or Hydroxyproline
  MOD_RES (32)..(32): Proline, modified Proline, or Hydroxyproline
  MOD_RES (33)..(33): Proline, modified Proline, or Hydroxyproline
  MOD_RES (35)..(35): Proline, modified Proline, or Hydroxyproline
  MOD_RES (36)..(36): Proline, modified Proline, or Hydroxyproline
  MOD_RES (38)..(38): Proline, modified Proline, or Hydroxyproline
  MOD_RES (39)..(39): Proline, modified Proline, or Hydroxyproline
  MOD_RES (41)..(41): Proline, modified Proline, or Hydroxyproline
  MOD_RES (42)..(42): Proline, modified Proline, or Hydroxyproline
  MOD_RES (44)..(44): Proline, modified Proline, or Hydroxyproline
  MOD_RES (45)..(45): Proline, modified Proline, or Hydroxyproline
  MOD_RES (47)..(47): Proline, modified Proline, or Hydroxyproline
  MOD_RES (48)..(48): Proline, modified Proline, or Hydroxyproline
  MOD_RES (50)..(50): Proline, modified Proline, or Hydroxyproline
  MOD_RES (51)..(51): Proline, modified Proline, or Hydroxyproline
  MOD_RES (53)..(53): Proline, modified Proline, or Hydroxyproline
  MOD_RES (54)..(54): Proline, modified Proline, or Hydroxyproline
  MOD_RES (56)..(56): Proline, modified Proline, or Hydroxyproline
  MOD_RES (57)..(57): Proline, modified Proline, or Hydroxyproline
  MOD_RES (59)..(59): Proline, modified Proline, or Hydroxyproline
  MOD_RES (60)..(60): Proline, modified Proline, or Hydroxyproline
